United States Patent Application Publication US 2026/0258423 A1 - sequence listing, part 47

SEQ ID NO: 301568 - DNA, 83257441 bp, Homo sapiens (residues 17,078,457-19,213,263 of 83,257,441)
  source 1..83257441: mol_type = genomic DNA
gtgctcacgcacctagtcctggggttgcctgtcaattctgcgactgtaattggttttgcttgtctcatttgagcttggcttagttttccgagctgacttcagaggcctcctggtcacaaggtcatcgttcttctggtcactaaaccaggcagacaggcttcttcctcctccccacctccctggttttccagttgcttcctgggctggatgagtgtttgctgctgttgccccagaggccaaacctgaaaatcaactaggtggaatttctggcttttctttttccacccattttatctcctgactttttctctaaaggagattagtctctcctaattaatctaaagtaggactgcattccaaactttgtaaagggttgaagatgcgagatttgatcgccttttccagttccacttggtgggtgaatgtttgtgtgcccatatgtgcagcattttaaaattgggactgtcctggaaagcctagtctcactatgtaaaataggcagcccctgcctatcctacccagagtttgtttctttgctgcaggggcgagacagactctggaagtatgagtggagataactgtccctagaggtaccttccagactgcggcagggggtggcgggggtgcctgggatttttgggtggtcattacagctcacatgtgcaaaggtcagaagtgggcgtgtttgtactcgagtcctaacctttgtgatgtgatatgttttctacttttgtttctggggtgaattaagaggatggtaccataatcctgtatcaactgtcacctcactggttcctacttaaaaagaattgtcttccttttcattctttccggtgagcatatttgtacatcatgattagagcatagggggtttttgctatgggaacgtctgtgctccagggtagtgtactggaggtgagcaccgattgtggacttggctggaagtaggagcagggagacaaagcatttggacactccgttcctttgaggcaagaaagcagacctggaggattagacttcacacttcgtgttctcctggcttagcccttacacagggagtagccctggggtcagagctgggctcctgcagctgtgaggtttatcttgcctccctgtggctgactgactggctgagtcctgcaattgacttaacagtatcagaggagcctcaagaggtcactggattacattcaggctgggctgggtcatgaaccatcccaaaaaaacaaagttccctgcactgtttccttggggactgataatttcagtcaggaaatctttctttaggtctaactaaagtccagcaaaatccattattccctctggctcagttgcacaagcacaaagagggtagcttctggggacgccttggtgctggcacaagtgcagagcacatgctgcctcccaggcacggcttctggataattgaggccgcttagccaggagcaccgacacttcacagtgcactgtggtctcccagcaacctggatatgagttgcgtattatttcatggagtgctcaggcagaggtgggactgtgccagggatgtggggaaagaaagaagtcccagggaaaacttggactgagagagggcatgggggcaggcccagagctgggagttttgggccacgggctgctttctggcagatgacctgggagctggagaaactgacccagtgagcccatcagtaaatactgctttgcccagccgaggctgtggaggggtttccctgttgtatcaggaaggtcacaggggaaggttgcaaggaggcacttagggtagaagccaggtgggaggaggcagaggctggagagatttctctagcacccagtgctctgcatcagggtttgctcctcagagccactccccagagtgagcagacagcctgtagcccaggagctccagcttaacggtcaaccgccctgagctgagagtcccaccccaaacaggctggcaggatcctgagacctggagcaggaaaactccatttcagataggcttatgtgtgggtaaactccagccaagctggaagcttcctttgtgagtgcctggaaatagaccagtggtcctcagcgtcatgcctcccagggccactggccatgtctggagtcatccttgattgtcacacctggggcaggaatgctgctggcatctagtgggtggaggccagggatgctactgaatctccttcacagaacagcccccagaacaaggaaggctccagcccaaaatgtcaacagtgccaaggccaagaaactgagcagtttcgacaggggtttatttaaattcttatttatttttaaaaatgaaaatgtaaatgtgatttgctattagctctgctcttaaacagcacgggactcacctgtcagatttcctggagtgagggggatgatggtgcagtgccagtcgtagaatggggtgggcctgtttctgatctagagaggtctacggggttcccctgcacaccaggcaaccacagggcctgcagaactgcttgtgtgtgtgtgtaccagggagcacataggtggcactccctacgtggtgccctcagaccgtgatgttgcaaagcaatccctacctgggcatttgtctccaaaagcagcagctctaagcagcccgtggctacctctgaccctcccaggctcatataataaactatagcattttatggctggtctgtgccctccacactcaatcagcatctatttcgaattgttactgacttatatgatgttaccatttgatttcatttgcttgagtgttatcttgccaactagactgacttcttgttgttgttgggcccgtgataattcttggtgtgtctccccattgtctagcatggggtttgggcggcacaaatctagccaggtgttctgtaaatatgtgtggagttgaactaccaactttgtaaatgccttgctgcgtaatttctgctcccagcttgaaaaccttaagacagggcgggtaggaaaagagagaagataggaaaaggggtgttcctcggagggagattagcaatgtagtgacctttagggattactcagcagaagggagaaaacctcccaagagctccagataactgggatggggaaaattcggttacctcagccccactgggttgggacctggagaggaaggtggacatcaggaggtcacagcgtgcaggagagggaggaaggcagcagcagtccctggatctggggacagtggcttcgggaagccctttctgctcggggacttctgctggggctggggctgctggacttcatccagttccggaagctgaccattgcctctccaggcagccctgagatggggctaactttggggaatctcttttccttttttgggaaatttctttctcgatacacccacgtaccctgtaactggtgggtgtggaggagaggcaaatttcccgaaaaaggaaaagaaatttctcaaatgcaggctgaggtgaggtggggtccgggcagcctcacagacaagtaaaagcctgagagatttggctgggcccctggtttttcaggagtggacaaagcaacaatctagaaacccagattgctgcctctgtcctctgcctttgtttctccacctgtaaagtgctgcccatgattttacctaattctgtcaccaagtttttggggactgatgtcgagctgaggtgtggatgtcaccagacatcactagaaggctcttgggaggagctccaggtctagaaggagagtgggagcgccaggagtttagggtggagcaggccaggccatgaggctttgggattctcaagggcctgctctccaaggcaaaaagctgatcaaatgctttttccaatttttttttttttttttttttttttttgagacggagtttcgctcttgttgcccaggctggagtgcaatggcgcagtctcggctcacagcaacctccgactcccaggttcaaaccattatcctgcctcagcctccggagtagctgggattacaggcatgggccaccatgcccagctaattttgtatttttagtagagatggggtttcttcatgctggacaggctggtcttgaactccagacctcaggtgatccgcccgcctcggcctcccaaagtgctgggattacaggcatgagccaccgtgcccggtctgttcgaatgtttttaactgtggtaagtacactggaaattcaccatcttaatcgtttttaagtgtgcagttcagtggcattaagtacattcacattgttgcacaaccaccaccaccggtctctctccaggacccttttcaacttgctaactgaactgtgcacccattgaactataactcccttccccagcccctggaaacccccatgctattctctgtctctatgaatttgactcctccagcacctcacataaatgggatcatgcagtgtttgtcctttgtgactggtgtatttcactcagcataaggtcctgaaagatcatcctggttggtgtcagaatttcctccctcctgattgtggtaggtctgatgatcttggaccatgtctgctgaccccaagcctctcacacatggaagccatggagagactgaggccaccttctgtggcaggcatggtgctgagggccggcctccatggtgtggagctctgctccatcctagcctggagagtccttgagcatcacgagagatgagagctgcctgactgtgtaggggctgtgctaaggactcataatctcagctcacatcctcggacatagtagagaaaacacttctagctcttggatatgtgcctttttcaggggcaacctgggagtttgtcagtcccgtaagatgtgaagttccagcctgagaaattaatttggggtgcctgtgtacttgtgtataaagtaaacaggcttggtccaaaggatcttcagagcactccaggtgcagacaggttaggattctggtttattttgagtttgcttcctataggagagtgtccaggaggttgccttgttcttgggacctctgctcacctcactcttgacaaatttctgcaatttttggtggtattaaagccatgagcagcccaacgttgcctaggcctgtgagagcctaggaggaggggcattaccgctgagccctgctgtctttaggatctatcatttgaggtttctctcccttttctgcagctgaccgcccagttcccattgctccctaagccatttttttgcagatgttgccctgcatcagaatctgcagggcgaggctgggaaaccagtttaaataaccactttgtgtgtttttttgttgttgtttttgtttttgtttgtttgtttgtttttgagatggagtctcactctgtcgccaggctggagtgcagtggcgtgatcttggctcactgcaacctccgtctcccgggttcaagtgattctcctgcttcagcctcccgagtagctggaactacaggcccgcgccaccatgcccggctaattttttgcatttttagtagaaacggtttcatcgtgttagccaggatggtctcgatctcctgacctcgtgatccgcccgcctcggcctcccagagtccatgtgatttctaaccactccatttgagaactgctgcttcaagctctgactttgtttcctctagctcggagctttcccaggcaggcgagaggaaccatctgctcctccttggtgctgaggcacctcccgggcatctgattctttgggaaccatagtggctgctgtgtccgtaacagagcggttgagaggacactaggccatggaaggcctcttctgtggtgaagctcatacctttcaggacccacatgaacatatgcagactaaatccctagcagaaccatgatgtgtaggctcttaaaggcggtgggtggttggggaggcagagaagtcttctgggaggagacaggtggcacttggctgccttttcgctcatcacagagattcgggaggagccatgtgcccggccggggctccttgctggcactttctgcccattctctatcctacttctcacaatggtagataccatgtccatttcacagttgaaaagactgaggcccagagagattgcgaggtggctcaactaatgagtgacagaccttgatgtgtaggcaaggcagactcctgctgagagagggatggtgtctttccttcaccaagtgatcttgtccttcacattcagagaggccgctccaccagcacctgctgcctcgtgcgggtggaaaatagggcttgctggaggccaggcagggctctcagtgtccttcctgaccctctggtttgtctgttgctgcagactgacccaactatagtagctgacctgtgtctttattaatgccattgaaccaagctagctgcaggcctgcaacgctgtagggtccacctgccttctttgctacatgggcatatgaatatatattcagagagatttacagaaatcagaacaataagaacatagagcctgtaactgtctgagaggcagagaagcttccttaggcctggaggcccttcatgtttaaaggacaggaaggggcaagacagggaaccggggaagatgttttatgggtcagtcttatactttcaggtttagctttaaatctgtcatgtttcagccttgccctggcctttgtgctgaggtcctggtcgcaagggaaaggaggcaggtcctgttgtgtggtgcgtggagcccaagtaccttagggagggcttgttggagtggggtcagtaactgtggggtcacccaggccctctctccctgtgtaggcacctcccgggctattcggaccacaggaagccctgtgttctttcctcctctgctcagctgctcatttctatttctgtgctgtgtgttttcagaatcagatcatttaaaaaaacaactttggactcgggtgtgttttcatctttacatgagccccacgagcaaggtatgaggggctgttaatgggggaggtagcccccgcaggccctccccatgcatcgcattcccgcggggtccctaggtgctttcagacttttggttgagagacttcggtctttaagtggaattctgcacggagtcttaatacaagttttaaaatgtatacagtcaggtgctgctttatttgaagttttggaatatttctgacccctccctcatcaacaacccctgcccctggcagctgcagaaaagaatacacactgacggctgggtgtggtggctcacgcctgtaatcccagcactttgggaggccgaggcgagcagatcacgaggtcaggagatcgagaccatctagctaacacggtgaaaccccatctctactaaaaatacaaaaaaattagccaggcatggtggcgggtgcctgtactcccagctactctggaggctgaggcaggagaatggcatgatcccgggaggcagagcttgcagtgagctgagatcacgccactgcactccagcctgggcagcagagtgagactctgtctcaaaacaaaaaggaatacacactgaccagaccggaccaacctccttctctgcggaattatccaggtgcccagaggcccagatcacagacctgttcaggaaaggcacctcttcttgtgcaatcatttgataatttttccaaatgaataaatttattttttaaagatttcccaaagtagtcaatgtcttcaagctctttgccagtggtgactggtgaatgagcagtgcccatgtttataggtgaactctcaggcacacggaggcttgtgttcacaaggagaagcggctgggtccggagcacagtccattggctttcagggctggcatggccacgagattccagaaattgaagacaagccaagggtgttgagaaggttcttccagggtgttgaggattttttacccctgccctccacccgacttgacttttcaggacacagagccttagatgagtccccatcccgtcttgatttggtcatgacaattgagatgttgcctatttgtaacaatgaattccttaatgaaggaaggtagattcttggctggaagatgaggtctgaaccagtgcggtggagtctgtgcgatgctcttttcagcagcagggagttggtgggataataagtggggcagggagggccctgctcgactgagcttcctgtaggccactttgccttagagcatctgtggccagatttaagttattttgaaacactaaaggtgagtgagccaggtctgggtgcaggtgaacccaggtaggatggaaacgcttcctaagtgctgtgaaagtagagggtaggggtcataagggaagctcagagctgtttgctgacaagtgacacccactttttttccctgaagtgtaatttacggtgactcatgaaagttcacccatttgagtggagcacgtagaggtcggagcattctctgtacctccgtgggagcttcaagatggatgttctctggaaactggaggctgagctttaagccccctcccttccttttgtcatagttgggaggttgggggagaagagctaatgacaggtccgggaagggcttgggacccagtcttataagtctcttggacccggaactgttaggcaggggcaggttctgcctttgggagctttcttgttgtttgcacctctgcccagaggcccaagtgacatttcccacactgaaagaatcagggaatggaagccagcaaaggttaatcatgggactgtgtggaccaaaaacagccaactcctgagggtgacagttgggggttcccactgtgacctgatccagaccttccattttgtagtgaggaagcttagctagggggagggggagggagtgactgaaccacagatgtggacaagcagccgggtccctggatctcctgtcccgacttagagcctgggagttgcccttcagggaaggaaagagggagagggaagtgtgtggggcagtttgaatgttctgtgcctccagtattagatgttctgtacctccagtgttggagtcatacgtggatggctgagccctgtagagggaagaagttggagcagaacgtgccagagtgagcaggcaaagaggatcagaggaagggacctctgcaggtactgagagggctctgcaggtcaccctgggtcattctggagagccaagagaagacacaggttggccctggccagacgcgagtcctccctgtgttcctaacccgaggacacctgtcagagcatgcggagcaccttgcccttaacttccacgaggatctccctctacaggacggtgagcgcctctaggcagcactggtgtctgcctgcgtagacagggcacatgttggttggctggcgaatcaggcagctgtcctccccagctctttcttgcttgagtttctgatgtaaagatttcaggtaggccactcccaaaagtcccccttctttgaatctcaggccgcactgagaggatttggtgacctcaggtgcccagtgagtgcctttctgtctcatcaggactgtcccgtgcgcttaccttcctgttacataagtggtgagtcaaggacacaaaatgggaattagctgccagcctgtgttcagggctataatgagatacccacattctctctctgccttccctgtgttgcctgagtggagtgactgctggccacccacaattgattatcaaggggctgaagaggggttccacctggttatccacttaggtgctctctgttcagacttttgccatgtgcacagctctttcagtgatggaaggtgatgggagcggcgagagctgtcgtgagggtaaaggggtttctgtggcccacaccccgcactggggaggcagccaggaagatgggctgtgattggcacccttgctggtctatcttcagagctgtgggtggacttctctgcagcagctgtgacggtaccctgcagcgtgaaggctcgtgataacgtactgggcgtctccctcccacacagagagaaatgactttagatattaagaaagtgaaaagcttggaatagttggttaggaaactaattaagtaagagcggggaaagaagtgtcaaaaaaagtcatttcatgggaggtgcaacagaaaatatttagggttgaaaaagcaaagccacatggctggtgctagtgtcttcacgtgtttgtgcagtgctcacacacttgcacaaacagggctggcagcatggagccagactgcaaagtcccccaggggcacatcccttccactctcaccttttaggcttcccttgctctgccccctgctgagatccccacctgcctggccatgtcttttgcctggggcattcctggaaaatatatcatgtccaaaaacagtctgatgagctgatccacgtagggcaccacttctggcaggcaatgtagtatgttagtgtcttagcctctcctggcctctgcaagactgtttttcagaaaaatcttttctttggccgggaaggaaatgttctttatggtggggaaaactctctgaacccggggagcagttgcactggtgggatctcagagatgcaggtcagcagcacagggaccttaggaaggaggtgtccttcaccttatgccatgtactggcctgagggctggtccagcccacacacaggcacggaccagtcacttgcaaacacctgccctcagtgtgtcagaatcgaactccagggtggcttcctttgtgggaggtgccagtcacagcacacaacatggcaggtgtgtttgtttcctgtggccactgtaacaagttgccacaaacttagtggcttaaaacaacacatctttgttctctgatggctctggaggttgagagtccaaaatgagtaccacttagctaaggtccagatgtgagcagggcagcttccttctgaggtcccgggggagaatcccctctccactgtttgcaggctccagtggccacctgccttccttggctcgtggcctcttcctgtcaccactacagtctcttgctcctgtcatcacatttccttatcctctttgtcacattttcctctgcctccctcttagatcagaatctggatgactttttctttcattttttattttttagagattgggtttttttttgtcacctatcctggagtgcagtggcgcagtcatagctcactgcagccttgagctcctgggcccaagtgatcttcctacctgagcctttcgagtatctgggattacagatgctccggtgttgagctctggggagttcagcagggctaagtaggacttgtgggggtgctgctaggtgtgaggtgtaggcgtgagaaacggggaaaggaagatggggccaccagagactgccctgatggatgacatagtcaccacctaggtatcagcatcaccccacttccagagcatttgtgttttcagtgtgaagcaggatcagggaatgtcattgctggaaaggacctggaagagccagccccgtcctcagttgggggcgatggagaagtggcttttgctccggttggggcagtgtggagcctggcactgcagagctttgaaggtttccctgactcaagtcagcgtggaagctgagcccctcaatgtgtagagcgcagcagacacgacgcctggcctcctgttcactgattcaaccccagggggaggtggggagacggaaaagactccttgtccttgagcagggtcgtcttgttggtgagactggttttgtgtttctcacgtgtgaggtgcagacaggcatggtgttgcagaccaagaccttggggcacgaaggtgaaggaacagggacagagcaggtggaggaggagagagactccctggagccacaaggctctgaaggactgtgcagtcccagctgtgacctacctccaaccagccgcactaaggcaggcttgtcccgcaggggcagaagggtcttacggccccaacccgtcccctgtcctcatgtagctaatgcttgcttttgggcttctgtctgttcctctgcctcgatggaagggtggtagatgggctgctccacaaagtctaataagcagtgagtcattgtcttcctctgagcccaccagggttgcacctggtggctggggaatgctttgtgatgcccagggcccagctgagaagcagtggtgttggggttcatcagtggtgttggccgtctgtctgcagggtgcagtggctgtcttggggcaaaagtccaaggctcacttcctctggacactgagtacagtttttggaaccagcaagcgtctgtgatcagtgtagaggtaaaaagaaatcacacacaaaccacagtgctagcgtcctcactgtgtttgcatttaatcctgaaaatggtcgcatgaggagagcagtaacttgcccaaaatcagggtttttctgggcgatctgggggttttgcgttgagccacaggttggagacctggtgggtggagctactctggctccattcccattctgtgagctggggcccagacacgccctagcctgaaggttttggagccttacctggttaatgtttgaagatctcggctatgccaggataaactggagcaggtatttacacctctgccaagtgatgggccctaacgctgtcaggtggccaatacctgtggagcgtgccggccacaggggaacacagggccaggagtcctcttggcttcatcccccaagacagctgaggtttgaagatctcgggggcggttggggagggggtggggtttgacttgcacctggatatggaggacatgcttgcctggccctgacttccagtgggttttcagcaagagacccaccgaggacgaccatatattctggtcccagcagcggacccagaggccgttctagctgtatctgaaggggccatgagaacggtaggtgtggggtggtctgggaaggagggtctttggggacatcatctagtccagccctcacctttgacagatgaggaaactgagacccagggggcaggcagggtccccactatcactcccagtaggcttcagagacagatgccgcttgctccgtgcagcatccctccctgcccggattggtgtgaacagggcagttgtcagcgagcagtgagcgaccaagagagacactcctcaaggctcagcccagcagatgctctcgtgcgtattaggtgctgggtgactgggggctgaatggaatgtgttgtccagggtcatgcggctggttgtcccagaaccatggctggacagccgacccttttccagtgcccttttcactacatcacatcccttgcggtcctcccggccctgcttaaagaggcagggttggtgcggctctccctcaggaaaaaccgagggtgcaaagaatggggagggtgagaggctgtgatgagagacatggacttgcagtgggagaggtgggatgtgtgttgcaagaacgccttgggtttcttgtttcttggggcctccattccgagatggagaagagaatactatttgtgctccacgagaaaagattaggaaaacagccccactccagtggacctggcagcattctatataaacatcgacatctgggagagaggtccagttgaatattgttgcaaatggacttgtgctctttttgggtgatgctatggcgacccacactagaggagggtgctggagcccagcgtcaggccagggccctctgtgggaacaaccccttaactccctgggccctgcctggcttgctttgtttgactgcctgtaccatcttgtcgcttcttccaccatattccccatggcatcctctccccactccaaagatgggtggtgtaagccctacaaagtggggcagatggctagagccacaggtgtcagcctcattcacatcatccatgtggccagacttcagcttcctctttctcatggtctgaggcgtgttatagtcgtgttaaatgtccagcgctagaattttagggaaggggagtggctgtgaatatatgtcaggtgcacactgtttggtcatctgcttgacttgtgctaggcactgtgatgtgcagaatatgtcattgtgacagctgcgtcctcgagggtcaggttaggtaggtggacacttctaatctttagcccctcccttcttagtagagtgggagtgggggacggagaggccagagcccagttggtgggaattcccgaaggcttccctcatccttttctttctccttgcttgcttctattcacgttttctgtctcctgcagcccatgggatcagaccctgcgctgagctccttcactgtgtgtctgttgctgaagtaaatgcaagccctgtcctttccagagcaggaaaggggagtaaagttttcctcctggggtcatttcacccttgttctctatctctctctctctctgtctcctacagagactctgcagggaaacacaggtgtaggtaatgtcaaaggacatccaacttgtgttctaggaccacagcctcgcccttctgtcgtggcccccactgggtgaggagagcgccccggccacaccaggggtcagttgtcgatggaaaggaatagacgtgcaagtgtgcatttactgtttgttctgtcacttaccagccatttgagaagtcctgggtgctgtgaggtggactgtgcagtaatttgaagggtggggaggggtaagagggctgttgcatagaagtctagccttagagtaacacatttgaattttggataaacgggtggcaacggccatgctggtttccttcatatattgttagccttttcctggctgggaaaaaagcatttgcctaattttagaacacatcagtcatttggttgaaacatcctatttcccccaaagtcaagtgtttgaattgtaacaactttggaggcttggaaaggatcttcgcatagtccctgcatgaactctcctgcattggatgccctgtctgaggagtttgacctaggagttagggaaacaatctttatttccaatgaagaattttatgtataaacacacctaaagagaagtgtaaaatgcttgacctgaggaccttgggagcagtctctcagacccttaaaacttattctgtattctcattggtgtgatagtggggcagtagtttgttgttgttattttttccggggcagggggattacataagatttacccatttctctccctatcatgcaatagttacccttggatcttactgtgctccctgatatatgtgaaggttgaaaatgggccagatgggaattttaaaggcaatgaggggctttaattgttttttcaaaatagtgtatgtacagtagttcaaaaagtcagatatgtaaccacaaagcttatactaaaagagttttctgctccatttcttcttactcctgagtcctgttcccagaggaagccatttcagctcttctagccagaatactccggtgcctacctctgtgtttgtaaataactggtttttactgctacttcttgagttttagaagatattatctattggttttatacaccacagataggatttagctctttcatcggcctggctccttgctcctacccagctacccttgtttttcctggtaatgttactcacagagctggccgtcctcacgttccagactgactctggctgtcctctggacctgctgcatagctctccatctgggcttgaccttccccatcatcctgggaagcctctctctctttctctctctctcttccaccttctcccccacctgtttttttgtttgttcgtttttgtttttgtggggttttttttggtttgttttttggtttttggtttacttcacttggtgaaacctcttgagaaatgcacagggaggaaaggttttgtggccttgcctgtctcaggatgcctgtcctgtgcacactcttgaccaggagctggactggctgtagaatgttagatgggacctaattttccttggaattttgaaggtggtgttcattttttaactttatcattggtattgagaagttcatatgcaagggtctgattcctgatcctttgcaaataaactgaattttccttccgaaaactttcaggagcttctctttatcccttgagttctaaaatttcatgaagatatgccttggtgtggatttgttttgttttattaagctagaggcttgtgtatatttcagtgtgggaagttctgaccttctagtccagagtgtgtcttatattttcttcctctggtaatttctttcttttttaactcatccctctcctctcttcactgtctttttttttttttttaatggagtctcgctctgtcacccaggtacagtagcacaatgttggctcactgcaacctccgcctcccaggttcaaatgattctcctgcttcagcctcccaggtagctgggactacaggtatgtgccaccatgcctggctaattttggtatttttggtagagatgggggtatcgccatgtttcccaggccagcctcaagctcctggactcaagcaatctgcccaccttggcctcccaaagtgctgtgattacaggagtgagccactgtgcccatcctggtaatttttttttaaaatttttcctggtctttacttctgaaactcctgttatttggctattactccttctgactcgattctctaagtttattgtctttttctgtggcttcgttttgcctgagatcacattaaccttgccttctaacccttctgttggggtctgattccacctattgaattgttaatttcttagagcttgttttttgttttccgtgtgtcctcttttgtagcatcctgtttgtgtttcatgggtgcagtactttctctaatcatttcagttattttgaagttgtattctgtctctggtctgactttcattctcctagttccctttctgtttgttatggtcttgggctttctcgaatgagtggcgacccttcagaaggaggctgtgtgtgtatatggggtgcgtgtaggaatatcgactggcaggctttgccttagaaggacaggcaggcagggcaccagtttgttttgggagagaccctagaatgtccgcacgtacgagccctctcgtctccattacatggagaatgacagttttaggaggtctttctcttgggcttgttggtttcccctgataggaattctctcatctccaatctaggaagacctgtgggcagcagaagggcttgggatgagggactcaacttttaggatgcagactttcttggacttttcctgctgttagtccttcacccctacttcccctgccccctcagctgtgcctgctgcccctgactctaggggccctcctagggcaaccctccgtgctggtcagtatataggattctctggccagagccaagccctgggatctgcctgcccttgtacgggtgctgatcagttctcctgctctcagccctgcccctgctgttggagtcccctctgcccccaggccctgagctttctggtgtctgcagcagtgccagcctgcctcctcctagctgtcctcaggaagcttcttccatgccaccaggccactttccatgtatccagccacttcccactcaaagtttacttgatatcttatatctgctcttgtctcctctccagcttttcatccttgagagtttatacctcccccccacacacactttatggtcatattaattagggttttagcaggcaattgaacattctggtgtgttaagtcacctgtgtttaactggaggcccctctgtgtgtcaggaactggcccgcagcctgtcgacacgtgttggtgtccatcatgggcatatcgtgcctgccttgtacccacctgtttccatgccactgttccctgtcctttcccacactgtcccctgtgtgggtcatattgttggtctgggcctgtgtagctctttgtgcttggcagggtgtgtgtgtgtgcagggtgtgtgtgtgtgtgtgtgtgtgtgtgtgtgtgtgtgtgtgtgtgtgtgtgtgtctcagagtcaatgcacatgcctgccaggggacctgtgtgtgttggcatcctgcattaaatgtaccatctataatttgctccagtaccttggagaaaattttatgaggaaaagatactttcataaatagttgaaattccagattcttctggttggaaacccaagggttaatgatgactgttgttccagaaaggttggagggagaggagacagtttatctcatttccctctggtgaataaggccatttactgatggggcccaatcacctacctgggactaacaataagacccttgttgttgactgggcaggttccacagctgatactccggctgccttgagcaataccatcaggcagatctggggctcagccctgtccttacccagggcctcagagcactaatatattttccttttcctcactccagatgtcttcccagtgactctccttggggcctggggaaaccacaagggagcttggattcattcacccattgctgccttgctgtgtgcctcagaggggctcagaggtggaaaataaatatgaaaaagcatccttgtcttctagaatctcgtcggctgctgggaagaccaaggggccagccatcgcagggagcataagcactgagacaggcacacgtgcctgcccggctatcgtagccaggctggcagccttgcaactccctggggaagaacaatctaggaacattctggggtgtggagcaggaagggagtgtcacatgcaaaaggcaggatcagccaaagcagaggggctgaagaagcagtgattcccccacctaatgtcagaagtaaaatcagttcatggtgaaaatttggggaaacaaaatcatgcagcaaaattgcctattaaaccccacacggaggtaaaaatcggttcatattgtggttatgtatctattctcttatgatgtgtatttatgtgcttatgtaagacctaaaaacaataatttttaaataaaccagttatttttaataagaatattctggccaggcatggtggttcatgcctgtaatcccaacactgtggtaggccaaggtgggcggatcgcttgaagccaggggttccaggctgcggtgagctaggattgcactactgcactccagcctgagtgacagagggagaccctgtctcttaaaaaaacaaaacaaattctatctcacaattcctttcctatccttctatgcatggtctttaatagctacaccccattccattgggtggctgtatttgattcctttattctgtactttcggacatccaagttgttttcagatttttacttttttaatatgatgcttcagagaacattcctggaagtaatgttgccagtgcagaggtgcaagcatgtttgagacagctgatagttacctctgtccagaactggctcactcccaacagcagcaggaggcacccagggtctctcactttcctttcaattttcctttctccacatcctacccccagatttgtctgacttttccagaggctattgagagaagctttttgagtgaggcaccacacagatgtttaagactaagtttgtggtctttgagaaccgaggtagcctgacccattggaagcctgcagataattgaaaaaatcttattttagatcctgtgtcattcttctgctatcaaaccagagccagcagcaaaggaagctgggggtgatgggccttcatccacctgccatgttgcctccctgcgctgcttctgccaagagtgggctgctgggggtgtcctgctggggccaggcaccagggttccaatgccaagtagtggcattcacgcaccttttgataagcgaggaaaccgctggcagcaggaagaaaggtaaagcagctccagggagctcagcgctcagcctcaacctctttccccagaacctgcgcctgcccactccacctccaaggcccctcactctccaccacccatttggccttttggaattgggactggaattgtttccagctccagaaggcccctgcctgcctaattcccatgtctctaaaaatatctgcaagcctcttcccacccaggcctgtccccacagagcccacttctctcccccgaccctcggctaggggaggaaatgagatctccctctcttgacaggattagaacggaataaatacgaaaggctgagtttccagagttgaaagggtagggctgcctttgtcgggtccggagggctggcgtggcatcggtgcaggcccacactcggaggagggaatccaggagaaagaaggaaggggaaaagagcaagaacccctttctcccctctgcatatgggatggccaagagaagccaggccctgctgtgggtccccggtgggaaagaagctggctcccagggctcccaagccccagccacgcctggtcagcacaggcaaaaggagtctgtgggaagcctccaacctccaggctgcctgaggcccctggagctttctcaggcattcctagattgggacagagcctcagacccctccctgccccaccccccagcattggatgcctgcctaatagaggctttatttatctccacattttcccagctctgtataaagagacaagcacgtgggtgaggcctacagatattccaaaagcagggggtagtggggtgggggatgaagaatacgcaaggatctgcttccaccatcccctagaggggctttggagggaggagggtgggctagggcaaagggtcgatgtgcaaaaggcttcttttctttcattttcccctactcagaaacccaaaaatagccatgtcaaaggcacatacattgcaaatagcagccgagaagagccagctgaaagccatttgcttctccctccctcctccctggacacactccccgtcctctgcagtccccttctttccaggctcttgctgggccaaccagtcctgcagccttgtagggtccagcacctccctatagggttactgagttgcatctaaattcacttaataggcggtcacagctttttgtgaaaacccatgaggaaatgtgaaaagtcctcctttggttcacttttcttgcaactttgaattttcctactaagagtccttaaagtgaagcaaacctgtagctaaaatgtagacaagagccaggcacagtgactcaggaggccaaagtgggagagtcagttgaggccaggagttcaagaccagcctgggcaacatagcaagaccgctgtctctacaaaaattttgaaaattagctggatgtggtggtgcatacctatagtcctagctacttgggaggctgaggccagaggatcgcttgagcctgggagttggaggctgcagtgagccttgattgcaccactgcagtctagcctgggagacagacagggagaccccatctcttttttaaaaaaaatgtagacaataaaaaatatataaagattggatttgatctcaagtcaagaggagtggtcatatgcaagagagtagatgccatgaaaatggtctgctgtcccaagtgtttttcccaattataaaactaacatatgtcttgtacaaattttgtaaaaattatacattttgtgaaaataggtaagcacaaagatcaaaagatgttttccaggaagaatcagatgggacatctccacctgatgtcactcgtggcaggcaaggggacacttatccttgtgtggtggtctcctcctgggatggcgctgggtggggaggcccaccttttggaggtcctttggtggctctgaccaggctccaccctgcactatagctgtcctggacggcgggttgaatagaagggtacagatttagaattgacttggaaacacgttaatttggaagcctaccttccccattccaaagagattctgacttgagatccaaggtttccagagcgcctcaatgcccttcctgaatcaccaagttcagtctggcttggagagcatggcacggctgacccagtgagtccagggtacagaggccagactcacagctcatttcaagctgggctttttcccccttgtcgaaccagtcaaaacaaacgaaattggattagtctgtcttcaagcactttgtcagaaaatacatgaattggtgtgtgtgtgtgtgtatttcagttctgccatctgttggctcaggggtccccagtgcccaggcaggtccatggcttattaggaactgggctgcacagcaggaggtgagtggcaggcgagctagcattactgcctgagctccacctctttcagcattagattttcataggagcgtgaagccagttctgaactgcacatgcaaggggtctaggttgtgtgctccttatgagagtctaatgcctgatgatctgttactgtctcccatcaccctcagatggcaccatctagttgcaggaaaacaagctcagggctcccactgattgattctacattatggtgagtatgtaataataatagaaataaagtgcacagtaaatgtaatgcgcttaaataatcctgaaaccatccatccattccctgtggccctggaaaaactgccttccacaaaagtggtccttggtaccaaaaagtttggggaccactgcattagctaaccttgaacagttttgcaatctcactaaacctaaatttcctcatctgtagaatggggagaataagaacagttttttaggatgactgtggatttaaaccagaactcagtggagcgctatatcctgtcttctctgccacccttctgcttcactcagggaatttatcttaagagttggggagaaggcaggggaaccttctgccatgtcctgctatgcttgtgtggccctctgagcaagggagagccttgcttcaccctcaataaagtatcttcctggtctcaggcccagtgacacctgccaactggttaagaagcagagtttaacatttcagtaatgttatatccggatattaagaaagaaaaggccgggcctggtggcccacacctgtaatcccagcactttgggatgccaaggcaggtggatcacctgaggtcaggagttcgagaccagcctggccaacaggatgaaaccccatctctactaaaaaatacaaaaattagccagacatggtggcaggcgcctgtaatcccagccactcaggctgaggctgaggcaggagaatcgcttgaactcgggaggcagaggttgcagtgagctgagattgcaccactgcactccagcctgggcaacaagagtgaaactccatctcaaaaaaaattttttttaaacaacaacaacaaaaaaaatatatatatagttacttcaaagaaaaaccttcagcaacattaaacagtagtgtagacagcagtgaggacttcagttgtgtatatattttcctgcctggggaattgtttcctgagggtagagttctagaaatagaatggaaaaggcccgtagggtaggtactgctatggctcctgtggcaggtttgcagactgctcaggcagctgcagttcaagtgccctttccaggccatgggctgccttcaagccatgcccagaaagcctgcctgccttggctctacatcctgatgtccaggaggtcaggcttggcctaaaagagggctggcttacccttggctcaaatgtcacccgcagggagctgggggctgaggaagaggaaacgtccaggtgggtgtagtcctctggcttctaggctttcctttcctatcttcatttttttttttaattttttttattttttaaaaatagagacaggatctccctatgttgcccaggctggtcccaaactcctggactcaagcaatcctcctgcctcggcctcccaaaacgctggaattacaggcatgagccaccgcacccagcctcccttcctgtctttatgggccactcctgtctgcgttacccatagtcaaggccaggccttgggccaggaagggggctataccatcagctccccaagtgtacaaggcccttgcctctcctttggcctacatgagcacctgccttgtactctatgttgtgccaggcattgtgggagatgccaagaaagccaatccctctgctgccccttcagtgctgagacacctgggcctccaaagggctggtgcagtgcggagctgtcaggctttcttctctgccaggtcattgtgatggggcaggtgatcgtcagggcacgtgtggagtgtgcgagcaggtccacccatgactagtggagcagccttggctaagccactttctcacctgtgcagtggtgacagccccctcctcagggtcattaaggaggtagtgagatggccatgtctcatgtcccatgcgcttggtatacacacccccaagagaggccaggcctgggctgacacaggtacccctcactctgtggcccaggtggcatctgctggcagcacacccaccctccctgtcttctgcagttccagcccagctagtggacacctgtccacagaggactctgaaggaaacatctgaaaggttagggccctgctgggcaacgttgaggtcgacactgtggacaggcagctccatgtaattcttcttcctgcccttacccagccaaacctgcacccttctgggggtggacctctgtttgtcccgtttgtaaccacttctgtctggcatgggctccaagagttgatgctgcatgcaggcctcatgtactttgacacaagtgtgagagtgctgggggttggaagactcatgtgtgccagcctccaggtacagctagcctgtttcctccatgccaaggccttgtctcccttgaggcagagtggtgtggtggagcgagtactggactaagtcagaaggcccaggcagttcaggcagccacagattaagtcacttccactctggccatggggtctttgtaagatgaggaggttatgtcagatgcgctctggtgaaagtatggaaaaaagcattggtgacgtgtggagctaaggaggtcaggcttgtcaccaggagctggccctgtccccagccatgtgtccccatcagcactgctgggaaagcagctcagaccccagggccggcagccgtgagggtatcttgcagtggctctttgggagcagcggctgctatttttagtaagctgcctaattggaggtcctggtggagcttaaccagctcaccttgtgctttgatccttctgtttggccttctctttttacgtggaaagagctgaagttcatgccctgaccaaagcagatttgtttttgcaggagacggaggcttttgctgttaaaaaaaactgccccttcccaggcccctgctctgtctcttaagtaatttccagtgggttgtcagcattgatgttggttccttcctaataagatctcccccttttatctgctatatcaggacatcaggggtgggggctgaaaagagtattgaaaaagatggaagcattactctctgcaggaaaacagattggttttaaaaatgctgtcctacatcctgcctcagatgatggcccttcgcacatgatttctctcacttttgatgccctcactttattttaagccgaagaaccaaaccttcgagtaaagcctctttgttcctttttagcagtgagatatctcctaggatgggagaccaggtgttttctcgggaacagtcatcatttagctttttcccaaaggaaaggaactctgtgtgtccctggtggctctgggaatggcgtgtgagcccatttcctcaggataaaactaagatggtaatgaataatgtctgtttgatttgtgtcagatattcatgtgacacagacactaagtgctcgtaaacactctcagttaattcttgtgacagcctttagggaataggcctcatgcttacctccattatacagatgaggaaaactgaggcctagagagtctgagtcgtcccactgctatgtgaccatgtgcctgcaccatctaacatggtgccagcgctcctgatgtgtggacgtgagtgtctgttttctggatgtgcatacagcagtgtaccaggctgcatgaccgtggggtgctgctgcatagaacctttggccatgagcgagtttttggtgaactaacagaattcattgtccccttcctggtagagaattgcttctgtgtcctgaggagatgtggcatgaagggtgggcaaggattgttcctgccagctgggtggccgtgtctttcatccttccttcctcccgaccagtccacggctgtgttcaagcctggtggggagccgtgaaggcagaaccgtttctccgtccttccttttgtccctgtcaccttcccctggctgctagcagagtacctgtcctgtgtcacagagagacagagccccaattgttttctttccgctgcgtctgctccttgcctccccctcagccacccacgaggtctcagtgctgtgccagctagcttgctgcagggagccgctgcctcccttcggagcacccacgcttccagtctcccttccatctttcataaaagcatgggcctgtggctcagtggtatgggccaccagctttgtccttaagacccctcttcattatttccctgagcccactctggggcccagtgtgggcacttgttcaggtttctctgttgggattcttcttggtttagggagggtggttggcatgtggtggagttgagaggggccttgttgcttccaggtgctttggtagagtggtcccaggtatccactgggcgtgtttgctgctttctcctgtcttccctgtcacagtccactttagggttatataaaccacacacagaagcctacaaatagacttttgttgttcatcctcaagtaggcactaattccattcgatggaacctgggatgggcatcgctttctcccagggcagggagcactgcctgctgtcccacagcatgtctcacccaccctcgtggtggggcaggtcgagggcccaacagggatgctcttgggctttttcactgcaggcctcagccagcacccccaggcagcccctgttgctgctctctggccaacagtctcctaagagtccagggttgcccattgctattgtggggtcacatatctttctacatccatactcctagggaggcggagtcggtcttgaaactgggtggggacccctccattcccccgtgctcctcttgactggggcagtactgttctcgccccctaagaaggaggtagaggtgaggtccctgttcaccttgtcttggagaccagtcaagacaggaaagctctcacctcagagatggatgggtcccttggccactgagtcaggccactgaggcagaggagggcaggcagtcactcactggtggtggtgtgagagacgctgtctctgattatccgacgtcctgtaatgagatacttttcagtgagggctgttccctggaaacagtgtgactccaggactatgggaagggggtctgatttgggccctaattccagctcagccattaccagcctggtggcctaggcagggccttcctttcaaggatttgatctttataatagttttgatctttatttagggttaggattaggttaaggttttgatctttaaaatagtttttcctaccccatataggacatctgccactcaaagggaggcatgttaaagaaaccttttattgtggcaagccgtaagacaaaaaaacatgtgcatcccaggttcagcttgatgaagtttcacagattaagcacacctgtgtagccagtaccatgatcaggatcttcctgagtccctcagtggctttgagggatctcagagcacggcatctccaggtgggtgtgggagcttgtccagggcgaagtgtctgcagtgttgcagtgaggcacggggtggcctcaccaccatgtctttctcagccctgccggcgtccaacacagcagaggtgctcagtaccccgttttctactgagtgactgaatgggtgaaaggcaactggattcctacactcttggtcttttccagggagtctgtgtcttggtgtttctgctgcttcactctttgtggtcgacttgtagaagcccctctgcccagaggacttgatcctgggcaggcagcagcaggaacacaccatgcctggcgtgggcagaacctgtgatcttgaaagagttgagcctccaccacttcagagagagggcagcaagagcgctctggagcctgccctccacagagcttggtgctttgagacctggacagtgcccaccagacagaatccacatagtgtttcctctcctccttccagaaccggatcttcctgagtccctcagtggctttgactggtgaaggctggccaggcctgctggagagatccgggatgcagagctgtttagtctgggaggcaggtcagtctcagaggatgggtgggtcagggctgaacacaaggaaaaaagacgccacacatggaaggaaatcaccactatgccatcataactgaccaactacattttcccaaccttggaaggacaaggtaggagtggcaggctagaaggataggtcttcaaacatcactgttgatgcaaagctcccataacaagttggatttctgagaagcagattgggaattcccagtgggagagaggcagatgagagcatccaagataacgacttctttcccagatgctggccttcctggaatgctggcagaggatctcagttcttaataattattttattgggtggggaagtctttggaagcagaaaataagccaaagaggaacttaatgtcatacccctttctcaaggaaagttttatctacaacacatttggtctattcttagcttctgctcctgtcctttggaaacgtagcctggagggtgtcgggatttaatgggctctagccccctgcccctccctttagagtgagggggtggattggtgtttgtgggttttctctgtgaatcagttctgagaacaccagagagcttctttcagggttctggacttactgccaggaggcccaattcctcccagtgacaaagtcactgaagacaagagtcttcaggaaggagcctcagagcctgggcagggcggggacttcaaggctgctgccaggtttgggtagatgtggggagcaggagccagacagaggctgggtgctattcaggttgctccggcatctggcatttgggcacaagacctgtccttagaaggcttggggctggcaggtgccttgtgagcctgacactgttggtgcagggagacacctgcatcatctcacgcagcagcttcctctggagttcagtgtcctggggcgcaacagggagggctgtggcctggcctgtattcaggtggatttggcacacaggcccaggctggtcctgcacatcccctgctagagagcaatccctaccctcctttgtccccttcgtgtctgagactctgatggcgggggaaacccagagattcctgttgtgcattgagctcgttcttgagttcccatctctctagctggtttggaatcttaagtttctccccagcaggtgatttgaagtcctttgggcttccagcttgcatgggttcctctgtgcctgcctgctgccctctgtgtctgtaagtggttggcaggaaggtgcatgtgtgagaacctatggtatgcccgcttagggccagggctgcagaggttgctcgctgctcaggggcctgcccggagccctggccacatgtcccgcctcacatacctgcaagggccatttccctgtagatagagcagttgcctgacacagccaccacctctccctttttcccaggcctgctggagaaggatggccctccctcctgccttgtccctcaggctgcctgagggtttcgttttcttgtggctggcatggcctttcagggtactgtccccaagcactttatgaatcataatcgcagctccagcatgtccattcacccccactgccagcaggctctttacagctgcattttgtctccacactcttctgtctttctttgctttcatcaggccctctttggcccagcaaaaagctgtaagtgacttaatacagctgggtggccagcctgggacagacagccatcggagccaagcctctggcatcaaatatagatcaaggtctccctttgaggcagtggttcccagccttggctgaacattagaatcactagagaagcttttaagaattcctatgcctcagccctacatctgagaatttaaatctgagtctctctctgggcatagaacctctattttgaaatcttcccaggtgattacattattcagcaaaagtttggaaccattgctttaagctctaaaaccttccattttaagccagctggcctttgtctctagcctctagagaggtctgggccccctgaagctgcttctccctgctgtagatccctcaggggtgaccgggagggtgctgggggtggggccgggtgaatgttatgggcctcacagctgcattgctttcagtctcactgcagcaaacagcagcttgttttctctagatctgcctggcaggcctttgggcagaaaaggcagttacaccatgtggcatggcagcgccctctccctctcaggctcaggcagacttggagaccaggcaagctgggacacaggaagctccatctgaagccaccagtggcagcactccgcccacctgtatgctagcactgcctcttctccagtgcaacttctcccgccggctgtggtgcgcagatttctgaaagcgctcaaacaggctgaagggcccttagcccccttctctccctttccttctgtgtcctctccttaccctcgccactttgttcccctcccttcttatccaaacatgccttggaaaggtctcaaaaactcatgctgaaggtataaaatattcaatcagtatccgttctgcccactgctgagctcgtgggtatatggggcaccgttgcaggttcttctctgagaattcaccagagggacttccagacagtggtgtaaaagggagtgtgcacttttgcagtagagtggagtctgcaagccaagaggccagaggagccatacataggctctgtgtgcaagggaaagcagttctctcacacgagtactgacacttttgagaccacaatgcctgtgtactgggattcaacagttaagtaaatggacggcaggtggcaggagccactgttgcacacagtgacaaggaacaggcaggcaagggaaggaggctagactgatccacggaggtgctagtgtgtttagttgatagagactttaataaagatacataaggatacagagagaagtgtttatagatatgtggtatgcccaggttatatacacctctatttccttgttccattagcggagagggcctagaagctgtgagacccgcgaaacaatgagcacacctgccatccagatcttgatttttaatggcactttccaataaaagtaaaccagggcttctggaggaaatgatcaattctagggctggggcgggaaatataccctaaaggtacatgaagcaccttgcaatgccaggaagtgctttgaggctgcacaggtgcacatgcggatgggggtgtgtcagggggacatgggagccggctgaaaagctcccagtgtccaaagctggaacactttgagcaacaaaataaatactgtaatgttggattatggtgtagtgtggatgtttgtcccctccaaacctcacgttgaaatgtgttccccagtgttggaggtggggcctagttgggaggcgtttgggtcatgagggcagatccctcatgagtagatcagtgccctgccctgggcggggcagcaagtgggttcttgctctgttagtttcctggagaccttgttgttaaaaagtgcctggcagcttccttctcactcccgccctcctctctgaccatgtgatctctgcacacaccagcgcccatttgccttccaccctgagtagagcagcacaaggccctccccagatgagatccccaatcttgaactttccagccatccagaattgtgagccaaataaccctctttttctttatagatgacccagcttcaggtattcccttatagcggcacaaaacagactaagacaagatataaaatccacaagtccgtattggcataaggaaatcatttagtaaagaaataaataaatgggagagaagaaacaaaatgtcctgtgcagaattccaggttatttatgcagctactccttacttaaggagatggccatagctccccactccgtgttgagtggtgacttccttccagagagcacaggggtggggagcagctctgcagcagagaaactgacaggcacgaccccagccaggcacttaaggtcatcatcaacagtgatcagtcgtgaagccttggaaggatgggaagagaaggggtatcacctctatggttgtcctcccttaaacacataaccacagtctagtcgtgagaacaacgtcagacaaacccaaattgaggtgcagtctacaacacacctgatcagcactcctcaaaaccatcaaggtcacccaaaacacagaaggtctgagaaactgttgcagccaaaaggagcctcaggggacaggacacttaatgtgatgtggggtcctgagtgggatcttggagcaggagaacagtagatgcaagctgaggccacctgaatcaagttgtgctgaatgaggtgtgagctttagttaataacaggtcagtattggtttattcattgtagcaaatgcactgcactgatgtattaataacagggtaaactgggtgagaggtgtaggagaactcttcacacactcttgtcttcttttctgtaaatgtgaatctattctgaaattaaaaggttattttaaaagtttaaaaaaaaaaaccaaaaaaaaaagaaaaaacctctaggcacagtgtcgtgggagagccctgtttcacaaggggtagtcccaaaaaaaaaaaaaaaaaaaaaaaaaagtaccatagagactcgaagagagaggaagccactgtaggccaggctgctaagaaggacctggaaagcaggtgccagtggccttgcccttgaaggacagggaagaccagcaccctggccatgaaggccccagcaggtgtcctgaggcaggaccagggccccaggtcatgagaggaaagctaggaagtgggggctcagcagggagcctcaccaggggctttttcccatctcccctgcagcctgggcacctgcctgctggcctgtgtgtccaggggggtctctgttttctgcttctgctgaggagggagacctggcaacgggtggcccctgagagaccatgctggggaacagctgtggagagtgaagccagcgtccctcttgggaccgcatgttctgttgtaggacttgttcagactcttctgcctgttaaaccgaggcagcaggaccaagtgggaactgcggactgactcagctgttacgggcggtaccaacagcaggcagtctcctaccttcctgagtgtgatgtctggtcagacctgtgcccagtctccctcaagcgggccgccttccccagcactgcccactcactctctgttcccaggaggcctttcccaccatatctgctggcttctcaccgaggcccttccccacatgctacccaccctggcatttgtttagcttgcccgactgcttggaagggcaaccgtccaggccaggtttcatcagttctgttcattgtcgcatgacagtcgtcggcaccccacagagcaggtgttgggtaaatattaatatttacgaggtgtgcgggtgctgtgggcagcgtggtccaccttgggcatgctgctgcgcttttccaactggtgtccctgtgtatgcgatggcagtgatacacctcatacttgcgggacagaacatgcctgtgtgaaaggcctgggtaacggcgctttcttatctccagctgagctctgtctctgccctcccactccttgggcctagctctctctgtcgggatctcccaggacaagtctcgagccttgtgcctggggccacctttaagacatctgaatcctccaaacccggcctccttgcccctgcatcccacaagtgcccatctcacagcagctatgtatgccctctcttccccccgtatcatgaagtctgtggcaggcaccatgtcttcctcatcactgtgaccccaagcctgatgtccagtagatgccatggagttaaaggatttgggggatggtggccctgccccgcagccccagcccctccccagctgcccctgtcctctgtacgtggaacagtcctggctcctgccgtctgctcctgcagggctcactcaggaccgtcatctgcatggttcatcgctcccatgaactgagttccacttactcccagcctcctcccctctgcccctttaaggggagcccagctctgcgggaggaggacagcctcctgaggacagggctgcaactgggctgtgggttggtgccactggacaaaggtgtttcagcgcagccggtggcgttgagggggagggagggaggatgaggcggccctcaggctgtgcctgtactgcgttccatccccactgagtagcacgcgggccttgggagaggctaggcatttctgctggtgacacagccaactcactctgtcctttctccctggccacaggaggccagtgaggcatcctcagccctgggctgtttcccagcggtcctccgagctcagacagctgggatggaacttggggtctcactagctcccatgagctttgggagctgtccacttggggactccccagggttggggctggaactgtttcatgccctggggggtggcaacttgaggctgcccttgcagacggctcctggccctgccctgcagtctcttcttccactgattggtatccctgcctgccctccccagctgagtccatcactagtggtatagctctcaagggtctgttttctatgaagacagggacagaaatgccagagaaaggtagctggggtataggtcaggtacagaatttttgaaaagaaatttgccagtagctgttctcaccctggcaaccaccattctactctctatgaatttgagtactttgggtgcttcacataagtggaatcatacagtatctatccttttgtgactggcttattgcacttagcatagtgttttcaagattcatccatagtatagcacataccagaatttctttcctttttatggctgaattatatggcagtgtatatacatactacattttgtttattcatctatctattggtggacactggagctgcttccatctgttggctattgtgaataatgctgccatggtacgtgggtgtacaaatatctgttcgagtccctgtgttcagttcctctgggtatatacctacaagtggaattgctggatgaaacagcaaatctataaagtccagtttaattttttgaagaagctccatactgctttccagagtggctgcaccacggttccagttactccatgacctcaccaacactgacagttttctgttttttaacttacctctaccctagtgaatgtgaactagcatctcattgtggctgatgtgatttgcattttcttttcttttcttttctttttttttttttttttttacttaagagacagggtctcactctgttgcccagactggagtgcagtggtgccatcacagctcactgcaacctcgaactcctgggctcaagggatcctccctgctcccaagtaactgggactataagagtacaccaccacatctggctatttattttttaatttttatttttagagatgaggtctcactatcttgcccaggttggtctcaaacttctggccccaagcaatcctcctgctttggccttctgaagtgctaggtgactttcattttctaatgactaatgacgtcaggcacctttttatgtgtgtcttggccatttgtatatcttctttgtatattcacatcctttgtctatttttaattgttttttgttgttgagttttaggagctgtttattctagatactaatactttgtcagatatatgatttgcaagtattcccttcccttccctaggttgccttttcgctctcttggtccttagatgtacaaaggtttttaattttgatgaagtctagtttatcttttttttttcttttgttgcttgtgcttttggcgtcatatccaagaaatggttgctaaatccagtgttacagggcttttttccttggtcttctgtgcattttatagcctttgttcttgcattgaggtatctgctccatttcaagttcattgttgcatatggtgtagtgtcacccttggttggtggatcctgctagctgaccattgtggtgggtgagggggatgaaaagctgttcttccccagttcccatgcctctcctaccttcttcccatctaccccccgcccacccaccaccagttttaggaggaaggtgggccttaactgggtgagggctcccaagggaagctcctctggcagagggcccttggccatttggcgggggccctggtatctcgctgcccaggcagcggccgaagccagcaggccagcctggcgtagcaggtgtgaggaggaacttcctggtcttggcagcaagtgaaaaaggtccttgttttcttattttctccgttaaaaaaaaagtagtttagtggttctaactatgcccctgggaaagccctgaacgggtcatttcctcagcatcccacaaagtcacttgtagcagaaggcccagcccacgcactgcagcaccaaggctggggcgaggcccacactgcattgttgctgctggcattagcagatgctgcacatcttggaggccccctcctgctaatccacgaatgcctcagaaagcatgcactgtctctggggccagagctgaatcttagaagagggcctacttgggatgggagcggtagctctgcgtctgtggtgacacccactgtcacattccagtagagggaaggaaaggtagggcctcgggattttggccctgactgcatggttcctgcttcttctgtgatggaggcggcatgctgtggtgggctaggagttaggaagcctgggcctgagtttccacgtccagacgttagggagaggtggggtgtagagggccttccaggcctgggttggcagggaggcgagctctttctcgtgatggagccatgaaggcctgttggaaggcctggcctgcttgctgctgagcctgtggtttctccctgttatctgtgcagtgttctgttttgttttgtttgaagtgtacaggtcattgtctttgaggatattcacgtggttatacaaccaccaacacaatctaatttcagagcatttttcatcaacccccaaacaaaccctgcatcccttagctgccaccgccactcctcccctcctgcttcccatctttatcgattggcctgtcctggacgcttgatgtaaatggagtcatgcagcatcatctcacaactttaccatctgctggttgcagcagagtcattggcccaaggctggggtggtggcttcagaccaacaccatggacttggtggcctaggtgctgatcatgcaaaggccattcctcaggggcctgcatctctttccagacagcttctctacctcatgccctgcagagcctgccactgtctggtctttgcacacgtgtcatcctgttaacccttaatgaatatgggattttggttaaaatgatggtttctattttataaataaaacgtatctattacatatataagtaaatcaaatatttatattataattaaatctataatataaatctagcagggttggcttgttccatcattcagaaatgtttactgaagcacatattggaaggtgctgacctaggtgtatagagtaaatacaaggagttttatcaggcaccttgtggcttagtatgcagagcagttgggcagacctgtggatgggccatggcctctgcacaggggctcccttcagggagcacaggacaatgatccaggaggggagatgtgccaggcaggcctctccggcaggacagtgataaaggaggctgctctgtgcagcgggtaaccgtgggtctcccaggccagcaagtaggtccaggaggcaaggtggggcaattggtgcagggagcagagcttgggctgggagctgttggagcagttgagttgtgggttggcttggccggatctatgttcatgaagaatggttctggggctgttcctgttgaatcattctgaggctcccagcactgctgtgcctaggagggtagaacccatgggcctcttcactgtgtaccaggtgttcccagctggcctcatctagccaagcctcccacggaactcccagaatcacaggtctgaggcctccgtcctgccagtccccagtctgtattggtgggcagtgggaaagggcctgccccgcatgcatctgcagctggggagaggggtcagaaatgttttgcaggtagtgtctggggccaggtgctgtcagcctggggctcagcagaggggcagaccctgctctcccctggaatgtggcctgggaaaccagcctctggtgctccccagggccccaaggcaagggccagagaggcacagggagaatctgcacggtactcagctgcctttggattgacccttcggcttggtccattgttttcaagagcccttatcagccatcttagcacaagtagatggccatggtctctgagtagaggatgtgccccctccccttgcagaagacggtggcccatgatgcccagagctcctcagtccactgagccctgcctctctgccacagggtagaagacggaacatgcccgacactgtcctccctccttcccaaacattcgaggaaagttgttgaacccatcgtcttctgaccaccacccttgcttggtaggagagtggtgatgtgcactgagaagcagcaggcggcacgggtgtgccatcccgagcctgagctcgagtcccgcttcagctgtgcagtatcgtttgtagtcttgtgacagaagggggtagattatcaccccaaagggaaatctctaggccaaaacattaggccacttctcattcccctcccctagcccctggcaaccactcctctgctttttctctatgggttggccttttctgaacatttcaccaagatggagtcacacagtgtgtgtccttttgtgactggcttcattcacttagcgtgatgtttccaaggtttgctcatgttggagcatgtgtcaggatttcattctttttatggctgaataaaataatattccattgtatgaatattgcattttgtctatccatttgtccactgatggacatttgggctgtttccaccttttggctatcgcgaattatgctgctacgatatgatttgtgtatatgttcgagtacctgtcttctgttcttttgggtatatatccagtaatcaacttgttgggtcatatggaaactgtctgtaattttttgaggaactgctaaagttttccacaatagctacaccactttacaatcaaaacgaggcctatatttactaccattttacattagggaaactgaggctcacaatttgcgacttgcccagaatcacagagctagtgagtgcagagctaggacttgactccaagggtaggctcttcttggctagagagctctgaaaacagattgcttagagtctaccttagatctcagaacttctgcagagggaaacagctgggagagcagtggtttgtggctccagctcttcctcctgtcctgggctgatggaagccccatgagctggtctccctggcctgtgctgtaggtccagcctaggtagccctggctggccaaagctgcctaaggtcctgggagtctcacgggggctgtgtggctagcccaggtcatggggtggtctcccggcccttctttctgcagccaaactacttctaggagcctgatctaacaaatcacaagcctctcttttgaggatgtgctggggaccaccccaaaagccatcgggtgtagaatgggcatccaactcttggcccaaagtccctctggggttgcaggaccctctctggggtctgccaggttgtagcatgcaggtttcatgtgggacacctgaagggtggggaagagtgcagaatcatggctcccttcccaaggaggtgataggacctggaatcagacctgacacctgaggacaggcattgggatgagggctcagcccagcctaggggctgttccatgcagcttcaggaggctacagtgtggaggatgattgtggaactgccctttgaaccatgaggactgtggagtacaccaggactggcggtgacgactgggaagggggaagggagttctgcctggtgggtacctgctaggcccattgtcagtccctaggcgtggttggcctaacacttctctgagttgtggcacagaggccaggcagaggctttgcttactctgggcctgcatgggatcatgaccccttttctgcggctctttccagtttcctcagaggacttgggctttggggatatctgtctgtggagagtgctgctccctggggaggtctgcagccccagagggactttgggccaagagttaagtgccctttctacacttgatggcctttggggtagtcaccagcacctcctcaaaagagaggggcttgtgatttgttagatcgggctcctagaagcagtttggctgcagcaagaagagccgggagaccacctttgacctgagccagccacacagcccccatgagccctgctcctgtgttgtgcctcccaggatgtgggttccaggggcgcctaggaactcagctggtgctccccaagggctgtgttccttcctgagaaaactctggagccaatgtcctgaattccaaagaaaggaaggacctctccttagacctggctcgagcagccagaccatgtctgcagcacagcccaccagcccaagggaggagggaggtggtgttcctgcctgggcgctgcctaatcaggccatagctcagtgaagtgccaggctgaaggcaggggccgtgctgggcaagtctccacgtggtccaggctgggtagccctgcctacagtttctctgataaacttaggcatgaccttgtgcaaacaattgttaagtccagggaggaaagatgccaaggagagaggggcaagggtgccagtcagagaggaccacacttgttctgggtggcccacagagtgccacgtcccataatcacttggagccccagcttgtacatttgaaagtcagaacaatgatgtgcctgcctcctgaagctgtcatcagtacctgtagctactcagggcctggccacagtgagcacccaggaagtggtgaatacacttcctgcttctactgcaaggcaattccctgtgtcctccctagaacgtgccgagctgcctgtccctgccagagtgcagatgagcaaggcgaccgctcagccccaaagtttgcagacaaagcttttcatactccttaagtgggtcacagtgcatatgaaaaaataataaatacagtgcacatggtagaaatactgactcaccgttttccatttcatgtgcatgtgtgcacttgtgtgtgtgctcatcatggtgtgaatgtggtgttccatgtgggccttggttggatgagtttgtgaaacatgctgtctcaggacctcaggtgtggggggaagtcaggtttcaccttgaaatcccctttctgaccttgagattttgggagtaattctttgccctaggggaaagcctttgtttcttgggtctctgttttctggtctgaatgagggattgggggataaagggaagactcccacccaggtctcacgtgcgactggttctgtaacagcagctgcctggaaggaaggtcctcctgatgataacgccaaacagcctctcaccatatttctgcttactttcctcttgtttccctctggctcttagaagcttgccttcccacactcatggggtcaacaagaaacaaaggcctgttttcccaaaagtgcttctgcttgggccaggggtgtggtggagagtccccggttggagaggctgctatagcagtattatcctaacccaggaaggtcactctggcctctgacaagatgccctggctgcagtgcacagagcttccagcctcccatgggcctgtggacagaggaccggcaggaggagcagggtgtgctcatctctttggagagaagcctgagtcctgtgtcctcctgcctaaacaatctgcagcctgtagcaactctgccccttagctggggtagggtggagcccagaagaggaccagaggctccagatagctggagggctatgtgggggctgaacccataacttggtgacatagcagagtcgatggcctacagagggccgtctctttttttggaaaatgaatcaaacaaaactaggtgaagctcagcctcctaggaaacctggattcctgacctctggaggtatagaattagggcaggaagctcatcagagttgctttgctgacagcgttagagctgaggcgttccttctggctggatttgggttacagcctagatatttgcccttactctcgcagcacaagattcaggcctacccagacacagatggttgtatcctgccccctaggcagaggcaggggaggggagaggtgctggctgaggggctccctggagccattggttgagtctgttcagtctggaaatgctgctgagtgcagagcagcagggggaccagctctggaaccagagtgcctgggtttgaatcctgacatggctacttcctagcattgtgaccttaaatcaaaattacagttctgcgttgtttaatgacaggcacacatcctgagaaatgtgttttctcaggcagtttggtccttgtgtaaatattctagagtgcacttacacaaagttagacagtacagcttattgcacacctaggctttgtggtagagcctattgctgcgaagccataaacctgtacagcatatactgcaatatcacaagcagttataacacagtggcaagtattgatgtatccaaacctagcaaaacatagagggagctgttgactaacatcgttgtgcggtgcatgactgcacctagcttcttagcagtctgcttccttgtctgcgggatgagagtgacagtagtgcctgcctcatagtgtgttcggaatgttcagtgagaggacacgggaagagtttgcagcagtgcgtggtattcaagggcatgggcgcaaacatgagcaccattgtgccctgcgcctgtgctggtgctgttgttgctgcttccccatcggcagcaggggaagggggaacactgcactactgagacttggagggagctattttctttttctttttctttttttaagttcaggggtgcaagtgcaggtttgtcacataggtaaagttgtgtcatggaagtttgttgtacaggttatttcatcacccagatattaagcctaatgcccattagttacttttcctgatcttctccctcttcccaccctccccactctgaaaggccccagtgtgtgttgtttctctccatgtgtctatatgttctcatcatttagctcccacttacaagtgagagcatgtgctgtgtggttttctgttcctgtgttcgtttgctaaagatagtggcctccagctccatccatgtccctgcaaagggtattatctcattcttttttatgactacataatattccatggtgtatatatatcacattttctttctctggtctgtatcattgatgggcattccgtgtctttgctattgtgaatagtgctacagtgaacatacatatgcatgtgtctttataatagaatgacttatattcctttgggtatatacccagtaatgagattgctgcatcaaatggtatttctatctttaggtctttgaggaattgccacactgtcttccacaatggctgaactaatttacactcccaccaacagtgtataagtgttcctttctctccacaatcgaagggagctgttttttgttttcattttgttgtttttttgtttatttgttttgttttgttttgtttttgagatggaatctcgctccatcacccaggctggagtgcagtggcgcaatctcggctcactgcaagctccgcctcccgggttcacgccattctcctgcctcagcctcccgagtagctgggactatagacgactgccaccacgcccagctaattttttgtatttttagtagagacagggtttcaccgtgttagccaggatgatctcgatctcctgacctcgtgatccgcccgtcttggcctcccaaagtgctgggattacaggcatgagccactgcgcctggccaaagggagctattttatagcaggtcctcagtacgtacctggacctgtcttccaagagtgctggttagaagcagtacataaatacaatttaaaaagttagtcccaaaccctcacgcagtgctagtgggaatgtgagatggcacagccactttgggaaatagtctggcagctcctcagagttaaacatatagtttccatatgacccagcacttctgctcctaggtacacacccaagagaaatgagagcacaggagcactgtacaggaatgtgcacagcagcactatacacagtagccaaaaaatggaaacagtccaaatgtccatcaacagatgaatggataaacaaaatgcggtatagccgcacaatggaacgttattcagctgtaaaaagtattgaaagactgacacatgctgcaatgcggaggaaccttgaaaatatgctaaatccttgaaaatatgctaaatggaagccagatttttccatttatgcaaggtatccagaagagatgcatccacagaggcaggaagcaggttagcagttgttgaggtggggacaggtgtcaaagggaagtgactgcgaatggcttttcagggggagatggaaatgttctgcacttgattgcagaacagctctgtgaacatgatgctaaaagccattgaactgtacactttaggtaaattgtatgtaaattatatctcaataaagctgttgttaaaaagaaaagttaggccaggggcggtggcttcgcgcctgtaatgccagcactgtgggaggctgaagcaggcggatcagttgatgtcaggagttcgagaccagcctggccaacatggtgaaaccccgtctctactaaaaatacaaaaattactataaaatacaaaaatataatactaaaaatacaaaaattagctgggtgtggtagcatgcatctgtagtcccagctagttgggaggctgagacaggagaatcccttgaacccaggggatggaggttgcagtgagctgagatcacaccactgcactccagcctgggcaacagagcgagacttcgtctcaaaaaaaaaaaaaaaaaaaaagaaagaaaaaacgaaaagttaataccaggattaaataaaaatgagatcatctgattaagagcaggaagttttttttccctcctccatggaaatagattgggctctggagttaaaatattcccttctttgataacgtatttacccccatttgctctcctttctctgtgtgtgatagggttaggtgatgcccgcctcacagtaagtaatattgaagagggcataaaagggagtgtaactgtgaaatcttgacacacaggtagttaatacatgctaatttccttcagtcctggctcagcttggtatgtttttgccttttattaatgcttctgaaatcctttttggaaggagatagaaccctcactttgcacatgaggaaactgaggcccagagaggtggagaggtggaaggcattgcttcatactcatttggtgaggctgagacacaaccacgttcagcagcagagcaggggctttgttcagctgggggccaagtgcccaaacaattactgcgtaagagggaagagtgggcttcagggacagtgagcaatttggtgacactgaaccctggaacagtggcctcaaagtggggtctgtgcctccagggggccggtggatgatcccttgagaagaaaactttggaatttctgttgatatattccatctaacatatgtctctgtgtgtgtgtgtgcacacgcatgcacactcataatagactggcaccatggtatggatacacagctcatccagggcctgtactgtcagcagtttgagaccacggtcccaaggaccagggtgggagtcaaagaccagagaggaagggccaccttaggaaagcccctctgcctccacagtggttccttcaggatggcttctgacactctagtaacgagtgcactggccactttaccatttcatgtcatccagtcctcactgtggtccatggagtttcctcagcaaacaagagagtccacctcagagagacaagatgccttgtctagggaggtggaggtggggtgcgcttttgcatgggggtgttgggctcaagagggaagtcagagcaacccttcatttgcccagagggttcagacaggcacctgcactatgccaggatgcccaggatgagaatttctgtcaaatagagtaaaggggctggagctggagagaggagattaggaaagccaggacccccaccttgggcaggaaggcccacctgtcctgtggctgtggccatagcactcagtgtgggtctccccaaccagaaggtggcaggggcttggatccaggcttcctggactaacataaagatggggtctgaggctgcctcctgtaccctctccttctcaagaaacacccactgcttggttgcagagcaaccctacccatctccctttcctggctccttctcaaggaccctccaagagtgtctggaagagacacctgcgggccactccactgatggagagcactgagctgggcttgaatgtggctcctcctcgtgtccccccagggtcagtgttgaggcaggatgccaatggtgtatgctgaaagggtgaagccactgaaggaggcttccctgtgagcccagcctccatcccacctgctgtgccacctcccttctgagctggacccacgggggatggctgagtccagagaccccacaaggaaaggcttcttggacctggacatttaaccatggagaaaagagccagcagccatgtaggcaagggctctgcaaagccagcagccctccggtctgactcctgcaggcaggcatcaaggggtgtagaaagaggtggcaagtaggtcagaggaagtaacaggaagatcacaggagcttgaggtggagggacaaggaggttgcacctaacctgtttctgaaaggaagaaggtcggggtgtggagagtggttggtctgagctcagcatgggcaccagacccagcatcctgctcttgagaccaagcccccattgactgtcagcaaggagcttgaggctggatggcctctgggtggaaggcagcccaactgcaggccacccctcagatggatcagaagcatcttctgcttcttcaagaatgagaacaaggaaatggtgggctgttgggggtgctcagtggagaagccagcagctgtccattagtggggtggagtcagtgtggagtgtgttaaggacaggggcacccctggtgtggtggtaaccatggcaacccatctgctctcccaaagcatccttacgttgggagagtaagaaagaggccagagggtacagggctaaacaagtcatctccataaaggtcctcttgcctagccctttgcctcagtagggatttcttaaaggcatcctttcctgcttttggttttctgtccctaatttcagtgtgtaacagtttttgctgtaagaaaaaaagttactgtttgccatgccagagctggtgtggcagcctttgctgggctctgctatggccctgggaaggtgccgtgggccaggctgccgggcgtgctccttggccgcctctaaagaaggcacagtgcacccaccccacagcctgctctcaaggatgtggcttctctctggccccctccttgcctctaaaaataaccctgctattttgaaactgcctcctctggagctttttcttgcttctctgtgggatcagcagcccttctgagaccaggatctcagctgcccctgtcaccgcagctgtccccatcctgtcctcccctgcatatcccctccagtgcaagtgggatgtcgctctccacgtaggagggatgtttagctgggtgtcctctggagaaggccaggcctgtccctgtcctccctgggatgggcacaaaggaagaggagctggggctggagtgagggagagcactcctagaggccccacaggctgggagggtcaggaatggcctggggctgtacgacatctgtggccccattggctggcctctgggtgactctctgccgccttcttccagcccacgacccttcctcagggcaccatcaacatgaaccagtgcacagatgtggtggatggggagggccgcacgggccagaagttctccctgtgtattctgacgcctgagaaggagcatttcatccgggcggagaccaaggagatcgtcagtgggtgagtatgctggcactgtggaacaaggcaccaccacctgccacagggccaacaccagatgggccgcctgcccctgtggcagtgtcgatgttgtctacttccccgtgtgcctctattcttgggctctgtctctgttctcaacaccgctgtgtgctgagcacagcagaaatcaggacattcaccattccacctgcagcctctggggcccctctttgctctggccaccttaccctcctcgggcctccccaccattgcactcaccacacccccaactcacctgcccctccacctggaaggggatcagtccctgaatcatatgacctgggcacgccctcccccagtctgggatggctgctcctccttccagggctggtgctgggctccaccacctatgaaagcgccaggttatctgctgtgtccacgtgtgtctctgtcagtggtggtgggggtgggaggtgtctcagtcacatccccagcacctcacacccgagccactctgctgccactgcacagattggtttctgtgagtggagagaatgggtaagtgtctcactcacccaggtcccctgagagtggcgaactggctcaggttgagagagcccacagtccaggggcctgagcgcagtgctgagcccagggcagcatctgccttcccagagctcccagtctagcagggaattctttgctacccacatggcctgggccatggtgaaaagccgtacatagtccgtgcaggtgaacaggctcattgggcctgacaggagctcacaaactggatctccgagaatccctgtcttgcttaaggctgagaaggaggcacatgagtctaagaagctctgggagaaagtaaacctggggcttgctgggccaggctgactgtagcagtacagagtagagggaatcaggaatacgaagcccttgagtttgaacacacagatgactcggagcaccagcctttctttagcctctcagctgcagcctggccaagcctggtgagtgagcacagctggaagtccagggccacatggcaaggcgtccaggagccagtgctgggtcccgggggcgctctctgcgggggtgtgctctcccctagagtcctcccctggagagaggcaggtttgcatttctgagcacctggagccgagctggaggagcacttctgtctcccacaatcttaatccagaaccatatgatcaagaatgtcaagggcctctgaagaaccctcgtggtacagtcgaggagacccagggcctagagacaggagcctggccaggggcaccttctgcactttctggctcacacctgtttctgctgttggccgggcagcacacagccgaggcttcctctgcccaggtggcttccctaggaaaccctcaccctttccacaggagctgggtcccagggagggtgtgggtaacaggtgggatggatgggagtcctgggtctccagggcaagctggggagtgtctggagcagggttggttctaggaccagcacatagaggtatgtgttgtaccatgtggtattaggagagggtgatgtttagcatttggactgcctccagcaggcagcttaagtcctgccagaagtcctcactccatcccaagcccctctcctgggtcacttctctgctctcttctgttgcatattcaggcttgccatacccatgcagcttgggtagacaagatcgttaatggaccaaggtaccgggtgcacatgccatctgggccctacgtgtgtggtggctcagtggcgtatccaaagccagaataagctgcctgacgctcttccccttcccctcgccctggttgtgggccacgttagttcgtgtccaacaggcaggttctcacgtggcataacctcgtgatccgccctcaccttcccacaagctgggatgctcagctgcgtgagggagtcaggtgtggcctatgcaccctggggacaagtgcttttgcctccttctcccattcctctgtctcctgccctcgctgacagcccccttcctctgctccctctcttgcctccctctgtttcccattataactcctcttcccagtaacctcatccctaggctctggagcgccattctgggtctgagctctctggtcacatcaaagctggtccctaagaaggtgcagacacttccaccaggcagctgggagctgggtgggttggggacagtcccacccagtcttcttcccaggtcttctctgcatagccctgacagctgcgtgggctgccgggtctctcctgggcctgggtagaggaagttggcagctctttccagttcccacttccaggattctgggccacactttacatagctcttttagacgaggtgggtttgggtaggagttggcaagggagctcttctgtgctctcagctgggtgaagtctggacttcccttctccctgccctgccttttaaccttacccactcccctgttctcactcatccgggctctgccgtccctatccggggagccccagcacctaccagtcccatattcacacccctctcctctcttcttggggtttgttttgttaacatttataacacatctggatgatgttagacgcttcctattgggcttccttgagaaatccaagtgcagaggacacattccatcatctattcctggaccctgcatctctgcgactccagccacagactgcagtctgaacagagattaagttgcataatgggactgaggccacatgagacacctgctgtcctgactcctcccgagtcctaggcttgctggagccagcccaggagagctcagcagctccacgtagtcagcagagcacctgcggtgcagccttctcccctcccctccaggttccatcctgcaaggccattagtcattgctgactgatggaacctgggccagtctgcaggggcctggggtacctggcagggttctgcacctccagcatgctccacaccttggtgaagttttaagtgcagccttctgcaggcacagtccctcagagtggtcagaagaagtggcagctgccatggcagactggaaaggcaaacctctttaatcccatagggcttgtgaacatcccaggttgtatgagcgaggccctctcctgggacctctgctcccagccagccttgatgagaagtgtgaccagggaggagaggggctcaggaccctcagaaggcctgcctgtctgctggctttgcagatagtcacagcctcctttcttgttttggggccgtggaggaatgacccacaggacctgtggcttggatctctggcattgcaggtgtttattcattctctcagcaaatcgagcatcactggctgtgggctgagctgggctgagggtggcccctcagctctgttgctgtggttccgtgcattaagcctggcctctgccgccaccacctgtcaacagcacacccatcctgaggctgtctcagaagccagtgattgtgactgacccttcctttgtctgtttgtccctccttccctcctttcttcattttctccttccctctcttcctgtcctcctcccctccctccctcctccccatgctcttcctctcttcgctcctctatcccttttccccctcccctcctctcctctccacctcaaattaaagaaatacctctgggcacagaagactcgagcccttctcctgccccaggctcagtgtgctgctgggtgctgcacccgtgtgatctctagcaggatacagcagtacagacccccccatccccaaccctgggcccaggctgccagcaggcccagcgtggaccctggtgctgaaagaagacctggagcggtgtcttctgaggctccttccactctggagaggacactagggctgcccttgcacaaccaggcccagggctggagctggggcttcagaggcaggacctacactgccctccgctcctcccacccccgtcgtctagcccccacaggactgacaggcagctctggcaaggcaactgctgttggttcctttgtctgttgtaaaattctatatggtggaagtagttgtgccatgatctgatctagctcctgatttcagaaatgagaagattgaagctcctaaggggccaggagccacccaagattgtgctgggatagtggcagaaccagatccagagtcgtcctgctggcagcgcctgcttttgctgtgttcccttgctgcacccctggtgtctatccagagtgaacttgccacacacaatccctgatgggtccctgggcagctctgcccagccttcctcaaagccagggtgcccagcaccctccctctgcagggactgtgggagttcagcaaccccccacaccctagtccctcaagagtacccattgtgggaacttgaccagcacagctcctagattctggcctcagggccagcacctgcctctgttgccctaaatgggcacagctcgtctgtactctcaccaagcccactctgggagagcagtgttagggcaattccaggccctggagacagggtcagtaatggaagttacacatcctatgctctgaggccatggccaggccaggcctctctgccagcacggagtctgtgtcgtgtcctgagcctgctgtgggtgtggcagggtcattgtccaggcttgctctgtggcacttctggccccagcgtagcagtctgtcactggggacaatgccctgctctactcctggaccacccggcaagggccagggctcctagtccccgagtgccagggtcttacctggtacttgtctccttttctcttcccaggtggctggagatgctcatggtctatccccggaccaacaagcagaatcagaagaagaaacggaaagtggagccccccacaccacaggtaggcagtgggtttgccagatggcatcccctcagtggagccagggcttgggaagaagtgagggctccctgaggttagagggtgaggacacagtcaggccagggctgaggcagtcaccaactctgcacatccttgctttgggctgcaatctgcaagatcctcactgagccacaggggaaccacaacagggacagggtggcctgctagtgtgctctggggctgcccaagggaagtttccagccagctagcagtacacagctgtgacccctcccctcgctatcctgctggcagctggggaggggcagcacgggcagcctgcagccacagtcaaaaggactctgcacccacagatggccctgcaggcagccggatgcagtaggatggggaggagaattctggagtggtatggcccataaggagctcacaggggcccttgctgcaactcccatgtgacctgagcagggcgtggctgactggggtggtccctcaaggcccagtccttccccacaggccatgatcctccttccctccctggccagtgtgcaaggcttagggcatagaagggtcctacaccgccttaccacactccccacgttcctggggccatgggggaatgaggtaaccttttttgagcctcagttaatcaacttgcaaagcaggcctgttgctgcctaatcgccaagattgttgtgagcatgaaaggaagttttggacctattataggttctcagtaaatgtaattcctttccctctgtaccatacgctactcttcccaagtcctgagcctcatagtcacccgagagggagcagggtggggatgggggtcccttgggcatcacaaggccagaggcccacagaagtgaagagagccagcccacgggctacagaggtcagggagcatgcactggtctgggtccctttctctcctcagccccttgggctgcccttggatatacctgccctgggctgctgtattggccctcctgctgatggagtcagcctgggccactctcagcccatggtcatccaccctccatcctggggtcagggaggcaggtgggggacacccaagccaacatccgctggaaaggagatgtcgctagcaagaagtcagcgaaaaatacagagtggttcctgggactgaaaatggagcttcctgctggggaacagcagttaatacgtaaatcccccaaagcttcccagttggagagaaacaaaaaaatcacaggcagaataacagcgtttagggttacactgcgtttccatggtgatgccttggaaacagtgcagaagcggagctcctgcctctaataaggtaactccaagtgcagaagccgctctcagcccagtccagggaacttgcttgctctccctccctcatgacacccagctccccaaaacagctacccatgaccaagtttcaacttttttgttggtagaaggagccacatgatcccagggtgggtaggttacccacttcactgagggtctcttagagtctggagcacagggttcctagccttctgcactcaggcccctcctaagacaaccttgcggggtctctcctttctaccctttggtcccgagagcatcccatttgaggctgcttgtttccagaagctttgaattgtaatcagaggccatctctttgtcaagtcagtcttgtggggtgacgtgggggcactgcagaggagcagcagggtccatggttgagatgggatctttggtcaggcctcccctctgcatgcagcctgatgctaaaggcattctcatggcctagggtggggctgggggtaaacctcacaccttcagagcacctggagaggcgagaacccaagaccctatatttctttctccatggcccagtgttggcccgggagagtttcagattgaaccagtggagagcttgaagcgttggctgcctgttgtgcccagtaagaatcagcttctccccttaaggaactcaggtgggaccttctggaaggttctgcttccagaagttggggccaaggatcgcactgcgggagcagcagacagcctttcagctgagggcgggagtctcaatagagtctaggcctgggagaagagaagggcttggccctgacaagagtttccaaagcctgtggcctgagaggcgtgggctccaggcaataaaggaaaaagcctggagcagaaggaaacgatgacccatgtaggtgtgaagggcggaaggatggagatggttgggaagcccagagctgtgtttccagccaggtgtgcaggccccgggtctccactcctctggtggagctgaaggaggcccgctcctccatctcccagccccccaggttcttctgcttttctctggctttcttctgagttcagtgtgagcccagccagcaccaccaggcccacatgtgtgtctccttccttaagaatcctgttttttactgggatgtctactgtcacccccactccaagttagaattcttccttcccgttggttgccatgctccgtgttcctgctagggaagtggggagccttctgaaactgctgcagagagaggccctgcttggcaagcaaggctctagagcaacttgtgctttggggaagcgctgctgccggggtgggcagttagggtggttctgccctgggtcttcttcccagggcagcacagctgctggtttcccatgggtaagcagcccaggatgctgtgcttggtgcagggacaggtcgtcctggggcggcatccccttgggtcattggagcccttgggaaacttgtcaggagaaaccttcactgtttgcttccgagaagctggcttcttctgaggggagccttcagcctgggagtctgtctgctggcagccctaagctgagtaggtggtcaggtgtgcgtcctgggtctgtgggaagagcctccctgcttttatcctgtccgtgaggcctggaatccttgcaaaagtgccaacagctttggacccagagccccacccaaggcagtgccccaccaccccatggccttcctgcttctggagcacgtggtggaaacactcagacccccatgctgcccctcactggctgtgtgcgtgtgggcctgctgcctcttctgtcagcgcctgcggcctcccttgggaggtgggtgggtgagactggatgtatggatcccagccaggctattgataaatagtctggtggtgatgctgcatctgcaagtgtgcgcacatacatgcatataaagaacctgtgtcatctgcaagcctctccaagggcccaagccagagagagactaaggtggttttctaaaaatgaggcttggccatcaggatgggagtgggaagtgggcacttgtatatcatgctcttgtcttttgcgagagagctgagatgtgcttcacttttggagaggggccaaagccatcctgttggcagccctctgggcagggttgttggggcccaggatgtgacctggcactgcggagcagctgaggatcacagccctgctgttgcctggattctgtgtttgcagagtcaagttagggttctctgcccagggactgcctctgcatctgcctaaatgcctgccccacaaacacttctccctcggagctaccacttccagaaccatggagagattggggattgacaccttttccatctgggctactggcttgtatctagctttgtgtgtgagcttgtgagtgtgagagagcaagcatgtgcacatgaatgtgtatatgcatttgtgagtgtgtgcctgtgtgcagattcaagtggggtatttggtgtctttgtgtgttctgtctgctataataaaataccacaggctagtcagcttataaataatagaaatttttctcacagcaggctggttagtccaagattaaagtgctagtattttgggtgtctggtgagggcccccttgctggtcctcacatgttagaaggggcaaggcagctctctgaggcctcttctatgaaggcactaatcctgtacatgagggctccactctcatgacctaatcacctcctaaaggccccacctcctgataccatcaccttgggggttaggatttcaacacatgagttgtggggagacacagacattgaaaccatagcatttaatttgcatctgacgactctttccttcacatagcgtctgggcactccattttagcttcttaggggcaaaaagcagagggtgggtaaggccacagggctggcccagacttgggcgctgtgaacttgttcttgcattcactgtaaggagctacagatgatgctggacctgtctcgagggtgtgttctctttccttactctgttctgtctcaccttatttgagtcttggatgtctaggaatgacagactccaaagcaactactgtggtctcactgttttggggcagtatctgaagattccaggcccctgacattgtgtagctggcccgggtgccccctatagctaggcagccaggacctgtgacccaacctgagctgtgtgctcctgcaccttcacagacaccactttctcctcctccaggagcctgggcctgccaaggtggctgttaccagcagcagcagcagcagcagcagcagcagcagcatccccagtgctgagaaagtccccaccaccaagtccacactctggcaggaagaaatgaggaccaaggaccagccagatggcagcagcctgagtccagctcagagtcccagccagagccagcctcctgctgccagctccctgcgggaacctgggctagagagcaaagaaggtgagcggaggccaggctggcttgtatgcacgggaatggccctccctcccatcagagctggccctggggattcagccaaggcctgtagagcccagtcgcaagcctggacctcgattccctttgtccatcagccctgggggtagcacctggcctggtatgttctgagattcccgggctccagtcttggccttgccccttctagctcttaaatcccatctttaaaggaggaagacagctcctgttctgtcagccccagttgcttgtcaggagaatcaaaaacgttttgcagcagggtctgtggatgggaaggcctctgtcactgcaccatcgtgtttctttctgtgtgcatcctgccccaagaagctgcagtcagtctcatccctctcaccatccgcattctgcctgggcccctggcagaaggaggggaaggggtgctggggaggcagcagttggcatcctcgtgccctgtcttttagcactttggaattacctgagcaggagcaggtcttccatctttgtctgtcttgttcccaggctctagagggctctgtaagacacaggctgggttttcccatctgtattttgtctagattgttaaaaataagtgagcagcaggggccagcccagctcgctctgtctgcatcttctacatgcactctgggtggaaggtgtctgaatcttcctctcaggcctatccattcaaaaatctattcactctgtctcacttctgtagaagtcccctgccccttcccaccaccagaatgcattaaaagactgaaggggccgggcatggtggctcacgcctataatcccagcactttgggaggctgaggcaggtggaacacctgaggtcaggagtttgagaccagcctggccaacatagtgaaatcccatctctgctaaaaatacaaaaattagccagatgtgggggtgcacacctgtagtcctagctacttgggaggctgaggcaggagaatcacttgagcccaggaggcagaggttgcagtgagctgagatcacaccactgcactctagcctggcgacagagcgagattgcatctcaaaaaaaaaaaaaaaaatactgaagggcttgttggctgtcagcttcccccttgatgttggtgagaagcggttggtggtgggggtcttgcgtcctgaggtacagatctgatcttccagccaagcccccagactagaactgcagggcctgcctgccagtctggctgagaggcagccagctgcaggggagagatggatgagagaaaaaagcatgcacgaaatatttcattcccatccatggttctttccgtctcactctgcccttgagtggggtgtgctggatgttagagacgggaggtggagaaggcccctgcttggatcctacatgggctttaaaaaaaaaagtcctcaaagcaaagctgccagcaggctgagtgcgtctcctccctcccactgtctcttccagaggagagcgccatgagtagcgaccgcatggactgtggccgcaaagtccgggtggagagcggctacttctctctggagaagaccaaacaggacttgaaggctgaagaacagcagctgcccccgccgctctcccctcccagccccagcacccccaaccacaggtacagttgccccgagtcgccctcccaggagctcggtggtcctcttccttccccaggtcctcgactcccccaccaaatggtctgcagcatctccctcagctccctggatgtggccagccagccacctgcctacgtggactctggcagcactagggggcgggggacagagagactggggagcgcctttgcctttaaagccagcaggcaatatgccaccctggccgacgtccctaaggccatcaggatcagccaccgagaagccttccaggtggagagaaggcggctggagcgtagaactcgggcccggagccctggcagggaggaggtggcccgtctgtttggcaacgagcggaggtaaggagcaggttagagggttgaacacccaggcccacacacatgcacttccacccacgcacatacactcatactctctgtttctctcacatacagtccccaagcctcccttggcggagcatgctttctgttcagagcataggggtattttccctctgggcccagaactcagctctagtagccagaatgcagaatttctgagcatcagaggtcgacgccaagaatagcagttttcacatcagtgcctcctaggactgggaccttaaggttccctgatgggttctcagctgcctggtccttgtggggctggatcttttcctcctgggccatttctattctctgaagtggcatggaggcagggagtccctagagctacatgtggtgacagaggcgctcctcaccctggcagtcccagggtgggcaaagggcactgagaggttcagaggcagacaggcatgcccaggaaggtgggggcagcacaggttcctctctcaaggacatgctccctggggagccacagccccaggaaacctgaggcaacctgtgaagcagctgagcaccaaatagcattgcttttgccctccaggggagcattgctttttgccctctaagactttgactggctggagagagagaaagtttggacatccgggcctagggcagggaccaggggcacaggtgcagaacttgactgctgccgaagaagatgagggcccatgccctgccctgcccttgttctccagagtttcctggagaactagagaaagagttggatgtcctctgaggcctccaagcccaaatccagacgcaagtgcccaagcacgccttcaatcaggcttgcacccctgcatctgtatactgaggctttgccttgacagcagggttcctcagccaggtttatggatagacttacagacttctggaggtccatgatgacctgccccctcaataaaacaatttcacagtattcttcccagaagagagttagggttaggcactcttctgggaagaagacccatagttttcattaggttcccaaggttcactgtccagaaaagaggttcaaaccatagttctggaagtcttctcagagtgtcctcccttccccagccacaacctggagctcagagttagagacgctaccaggagggacaggtgaaggcagccatgggctcccgtgcctcgaagggcaggtggagggaagtgtctttacatcctgcccccttttcttctgagcacccaccattggctgacagcccacccactcttccaaacgtcccagatgaaaaggcctgtgagcctgcaggttagtctccaggataaggaagcatctcccagagatactgctggtgagaggaaaatgacacgttgacttcctagggaaaggaagggcagccaagtggttcccagcccctgcctagtgccccagggtgctctgctaagcacttggctgccttaatgtttcatagtagcctgatgaggatctgttactaccgcccccagttatagatgtgaaaactgaggctcaggagtaggtgacttctcaacaatggatagctggtgcagatcccagtggggccttagccaggaagtccctgctcccatcctgtgatccaggactgatgccaaggatgctcttttaagcaattaagaaaatatataagtaaagggttttgctagagagaggaggaggccagtgggtgggcaggggaggcttcatgctggctggcaagcaggctgtgtgtcgtggtggctccagagcaggatcagctatgtcctggtttagcgccagaccacagaattagcattcagcacacctgcttggcttggcttcttctcggagagactccttttgaactcgttcttgtctcctgtcgcctgggacaggtgcagtctctggggctttgtactctgcatgcactgccacacggggatgggttttcacctggtgctggccccaccccccaccagttctgcatactaatactgcagcatccctttctcctgaccctggtgacatctgattggctgctgtcgctttctgaggcctgctcactggatccctagtagcccaccctgtgcttggttggattcctgtcccctggttgattagagcagaatctccaaattggcaagagattcttggccacacctacctgaaatggcagccacaataggtgtgcccaggagccagactgctgggaccacagggttggttttttgacaagccacagtcatctaggcaagcctatctgaacctgaccggttctgggcttcgatgtgtccgttcctcagacttccagagtgtttcttggatagtgagtcacctctggctgctgagtgggggaagttgttttcctggttggcctgctggtgactggcagcaaggacagctccccatgtagccctaacccccctgccctcagcacagcggttagtgccctgggaaccctggagctgcagggtgcaggccccgttttctgtgctgaccagtaaggtgcttgctgtcccacctgcagcttccagggcaccaagtaataactttccacctcgcccagtagatcagggcagccagtgtgcgagcctgtggtcttacaggatctccccaggcccccatgcagagtgactgtagcaagtgcctttcctcttctccaccacgactcctctgtctggatccccacagtaccacggcatgcgatttgcatgaggttaaagcccagcagttcctcactgctttcctggggctttctaggccccagtgttgggcagaggagccctcatcctggaagtggcctgttggtgagccttgaatctcaccaagatcccaccacaatcgctcaagtgtggtggacgcctggcttgcacttaccaagctttccctgggtgtcctggaactccagcagcttccttagcttcctgctctcacaatgccgcggcctctgctgctcccctaccccagcgcctgcctccgctgctggttctagcaggctggcccggcacaagcttctttcctgaggaagacactttgtgtctaagcacagggaggaagctgagctgaggaagacactttgtgtctaagcgcagggaggaagcagagcccggggccctcgccctcctctctccgggggtgaagacgccttaggcagccagttttccctcgcactccctgagaagcagctggcctcttgggggaggtggggtctcaggaattgatcttgtttcctctcttccttgtggagataattaggcttccaggcttgggagcccttcacccacttcctctgggttcttatcctcttgtccagagcagcagtgacaccctccccgccaggtaacttaggtgcccctgggagaacaggcccggccctgtgagctgagcctcagctggtgcgtcccccacctctgaccccaccagggtgacttcttgcagctggaggacaatcatggtctctctccctcttcagtgattaccttgggtttttgcttctttaattctttggataattttggttcaccattatttgatttgaaaaagcagcgctcttccatgtattcatttcccagccttgttttctttcaggtcttgcctctgcgctctcctgctgtgccgctgggtggcgctgcgcctcctccacccgcttcgcccccatctaagctccgtctccggccgtagacagcctgaggaggccgccagccctttcacatgaaatcagcctgctttgtttttgttttaatttggtctttgattccttttactgttggcagaaacaatgttaattcctgggcctcttccttgctaaattttggggtggggggtgcactgtgatccatgagggatgcaatgagaatggaggctgccttccgtggtggtggttgccttttgatcatgtctgtggctcaggagaggctgccgggtgccaagctgtgtgaatgccgagtgggtcagcaccacagagcctgcagggcctctagcgcgggggcagagggtaggggcaagcgcaggcctgatgggagggagggccgtggaggggtgcaggcagagctcgggtcagctgagcacgtgtctagacaacctcggtgctgtgcaagcctgaggggaatcaggcccgggccaggccgggcatgggaggagtcggctcactgccacctcacagctcacctcactgccacctcagggcctcgtgtcctctcttgcaggaggtcccaggtgattgaaaagtttgaggccttggacattgagaaggcagagcacatggagaccaatgcagtggggccctcaccatccagcgacacacgccagggccgcagcgagaagagggcgttccctaggaagcgggtgagctcctggggctgggcagcacctcaggggtggctcgggggcgggtcagcatgcaccccatgcgccaagtcccctccacacaggcctgggatgtgctcctgccaggcttctctccaaccacctcctctgcatagtgacttcttgagagcaggcctgtctcctgcagcttcatatcagagccttctccgtctctgctgaaggatattctcatgcattttagatcccagatttaattaggatcactctcttcctatctgagacagcccagcaacaaggctgaatgtcacaccttcctaactctttctttcagtacaactacacccctcgtttctccactcagcccaaggtagactcggcttctgaaatcctcctgggcacccgcctgctgcttttgtagccggccaagtctaagctcatcttctcctggcttctctcttgttcacaaggtgcctagtgcctactgtctggcccacagcttgccacctgccaccacagagcccagggctcttccttctgtgacccagagaagctggaggatggggtggggccaggaaagtgacagtgactgggaatccaaaagaaaaggctgctctatcaaccagggcatctcaggacccgggtcctgtcctggccctgctgcagacttgctatggtggctaggcagatcactgcccctcgccaggagcaaggccctggcggctcttggaggggtggacagcaccagctcgtccctcacatgcccacattgccctgggctgcactgaccagcggctgctctctgccacaggacttcaccaatgaagcccccccagctcctctcccagacgcctcggcttcccccctgtctccacaccgaagagccaagtcactggacaggaggtccacggagccctccgtgacggtgagcccaggcgccgcgtcctccggaggccgtgctcctctgcttctggtcactctgaggcgctgtctgtttctgtctatgcgtccatgccagctgtccctctgtgcacaggccctcgtgtccgtgagcacccccacccaccgacccacaggccgtcgaacacagattctgtttcttcccttttctggtcccagcagaaccaagggctccatggcatcctgagctctgggaggaggccctgcggaggaggccacctcgggctaggcagactcccgactctaggcggcagggctgcagcagggaccctccgctcctctggctttgggcattgctttttgtggcacttcggaggcagaggccacgtcttgctggagcttgtctcgttctccgtgtcatgcctcaagtggaagagcaggccttgcaccaggttctccatgggcctcagagctatgacaacagaggtgcggaaggagtggtcagggtacaggagcaaggccaactcagcatgctgacccagctcctacccgctctgtcttcagcctccaggggagcctggggcctgctcactgcctcttgtctcctccttgctgcctgcacagcagctcaccatgggcctccggcctgccccagggcttgggggctgccaaccacagattgatgtgtaacatggagtgtgaggaggagtaaggtttgggtttttccttcagtctgggttttgcttcaggtgtcttgaacaaaactccttgtttctctgttaacttagctgggagcgccttccccaacagagaacaccagcagggaacccacctgcataggccttgccattggggtcagattgcaggcttggcttcaatggcacaaccatgatatggaaattacgagtttttgttaaagatctgcaagctaggccgggcacggtggctcacgtctgtaatccaagcactttgggaggccgaggtgggcagatcacgaggtcaagagatcgagaccatcctgaccaacatggtgaaacactgactctactaaaaatacaaaaattagctgggtgtggtgtcgcgctcctgtagtcccagctatttgagaggctgaggcaggagaatcgcttgaacccgggaggcggaggttgcagtgagctgagatcgcgccactgcactccggcctggcgacagagcgagactccgtctcaaaaaaaagaaagatctgcaagctaagcaggctgtcagagagggggcaggtggcagtcccacgtctcaggtcctgtgccgcaatggcaactacaagcttgcaggagaggacctccctatttaagggctacttggggtagggtgtcctaatttcacagtgttgcttttgattgggtgcttcaaataactctggcggcaaggacagttgcacagcttggcaggacgttggggttgaaacagggctctgtagagggacttcttatctatctgggtcagtcttggccagacctaggcagcagcggactgtggttccttcctcactcctcagagacagggttctgagcagaggctcccagagcgctttgttctggtagttatcctgacaattcttgcctgttctcactctcactccttggaataatacaaacagacatcaaagctagcttctgctcagatggctgtagaaaagagagcacctcggaccagagataaggtgacccatgtctctgtggggccagccaggtgggctgtagatggcagtgctgtctcaggctgttcctcagggcccaggtgtgtctgggcggcacaggtggaggaaggacaagagcgctgtgcctgggcgctgcccccctgtctgccatcctgcttcttgtgggggaatacaggtcaagcctattcctggtggagaaatggcctgagggtctcagcggggctgcagctgctgcttcctcaacaccgcacgtctctgtttcccaggcttcctgtggcttctgcaagaacttttgaatcaattctcctttcagccttccctgcagatgtttcccttcaaataaaatgttctgtgactcttcatctgggcttgttttctgcctcccagataggccctgtgcagtgggccctgtacaggccggagcccacactgctcacagggcaatgagaccataccttctctcctgccagcctgccaagcccagcatctccttcctcaaggtcgcgtgtgcctacagaaggctggttgcaggcagcacccaccagggtgagggggctgcacaggcttgtctggcaggtggagaaacccctttcctggtacccgcctcatctggacagaaatactggccccatcagacactcatgacactagaagagtttcctctgagctgttcttttttctccctttctcagcccgacctgctgaatttcaagaaaggctggctgactaagcagtatgaggacggccaggtgagtgtgcagggttgccgtggcccctgagggatctggggacagggtgagggtgagctgtccttgtccccagccagtctgcaagtgctggctccatgccttcctcctccatgccccttgtcttcatgaccagggctgtggctgagactcccatctgctcctagaagtgcaggcacacagccttcatttctgcagtggggggtgctctggaggggcactcggtaggcctgtctgctgatggcaagcgggtgttggcccggccttagggatgccttgtaacactagcccccacctggtgatctttcctaaaagttgtttaggggcctggcttccccagggacaaagaaactctctggctgtgggattggcttgtgtttccatgcaagccagccaagtagacagtagcctagcactgcaagactctcatgccagagacccctcagctgcagtggcagtgttagccctggaaggagcaaacatggtacattcttgccatcagactcaagcaggaagagccatctgaggctggacctgccagcccaccttgaccctgtgccatgggctggaaggccaggcctcccaaggaggcatgaagaaaagcctgctgggtccttacctaagaggccctgatgcctagcccatcctcactcccttcctgcttcctgagctgctatcccaagacatcctctttatttctcctccatatcaaatgcccttggcctggcatgaagactcaagttcccttccttactgctcacagtgaagacttggtctctagctggttagttacccctgctggttaggaggccacatggccatggcttgcgggctgccacctgcaggtggagatgccatttcacagccacctttccgttctgatgggcccagcctgttgtctgcagcctctgtagttactgaggaccgcacggcctggccaccagccacaccattggtcatagagcccacagccaaggcctgctcagctgtctgtgctgcctcttcactggagggtcacagcttagtgagcgtcctgagggtgtgagcgcatggctgcctgcagtccgagcagagtcctctgtatgctgtcaagggaggggccagcctgtcccctgctttccctgtgctctgggagggccccacaggctctggctgcgcaccgccgtggcgtggcaggcatgctgtataggagttggtagtcgagtcatttttcttttcttcccctttagtggaagaaacactggtttgtcctcgccgatcaaagcctgagatactacagggattcagtggctgaggaggtgagtgtctgggctttgcctctgctgtggagacagctggaggggtccaggcggcatctggggctagtagatctgcttccccctgggctaatgtccccacttctgaggacagcgcccttcggtggtgttaccttgccgaaggtatgtccatgttgccctcttgggtttcccagtcccgacctggtgggaaggtgagcacaagaccagcctttgtccttgtgatcattttcctggctgtgatgctgggcttcgtcaaggccttgaattaagtgcccagtgcagtgggtttgggcagcttttcttttctctgttctttgaaaaacactgaaatttgaaaactcaggatgaacaattttgttttttccacaaagagatttcatggtaaatggagttggaagaattgaactacatcttgtgccctgccttctggacaaggacaggataggatagatgagcttttttgggcccctggacagtcctgattctgtggtcaaggaccaaatagaaggggttctttttttcttcacctacaaataaaataacctcttctaaacagtttggcaagtctcctttgccttttccccagtagtttcactccaggaatccctcagataactcccacatgtggaaaaacgtctgtttcaggttagtcattcccacacgtttgtaacagccagatgattggaaagagcctaaatacccatcattaagggccgggatatgtattaaatactctgagccagtctttacagactgaaggagaaaaggtggtagtgataagaagtaggggtaggagagtgtgggcggtgggcctctggtggtgtccagcgttggggaagtaaggagcctatgtaagtgtttggttgcatgtgcatagaagagcacttccgagtgtggtctgtagacctctgggggtccctgaggccctttcaggagagcagtggtggttaaaataatttgtaatattaagatgtcattgacttttttttgcgtgtgaccatctgcactgatggtgcaaaagcaatgggaggtaaagccactagcacttggcacagccccatctgtagcaacaggctggaccagtggtcactggattcttcactgccatacattttaaataattaatcgttttaaaataaataaggtccttgaaagagcagcagaagttactaattttatgaagcctcaatctttaaatgcccatctttttaatattctgtgatttgaaatgggaagtaagcatcgcctggctgcatactagagtgtgcaggctttctcatggaaaggacttgtgtgattgagttgccagctgaactagcagcttcttttggagcaccacgtttacttgaaaaacaactgataggcaaaactgtggtcattaattttgggtgtttggcatatattttcatgaaaatgaaccaagttggctcattcctctaaggaaaacaactgacagaatttgttgccagtgatataatttgagcttccaagcaaaaattagaacttgggaaaatttgtattcaccatcatgaacttccctttacttacactctcctgatgaaataggtggtggtattagcaaaggcgatattttaatattacataatgaaatgtgtagacaattggaagctgtgcataacaatattttccatgtgaccagtacctaatgttacaaaagcatgcctgggttttaatgtaacacagtacagagagttcatgggcatgatttcagataccacattgcagttaacctttaagagcctactgcttgtcaaagaacagccacaactacctgaaaaagctattaaaaatacttcctttgttgtccgggggcggtggctcatgcctgtaatcccagcactttggaggccaaggcaggcggatcacctgaggtcaggagtttgagaccagcctagccaacatggtgaaaccctgtctctactaaaaatacaaaaattagctgggcttggtggtggtcatctgtagtcccagctactcgggagactgaggcaagagaatcacttgaacccgggaggcagaggttgcagtgagctgaaatcgtgtcactgcacttcagcctgagtgacagagcaagaccccatctcaaaaaaaaaaaaaacttccgtattgaacagatggaatgcagaaacaagaatccagctgtcctttctgaagacagatgttagagagatttgcaaaaattcaaagcaatgtgactcttatcactgattgttaaatcagatttttattttaaaatgaatttattttattctcaaatgaacaaatatatttaaattttacatttatattaatatatattttcatatatatttaaatgtataaaatatattttataatatattttaaaatatatttaaatatttttaaattaaaatttttaaaatatttacattttaatttctaacatagtaaataccatcaatagatgaaatccacctaacagaagctcttctagggccaccagtttttaagagtgtgaagggatttcaacagcagcatgtttgaggaccactggcgtggactatctttggctggatacagggacagatggtggtgtgattgcacccagtgaggggcctgggtcatgcagtagtaggatagacggtgtcctcacttgtcagtgtgtatactattaaaagtaaagtcagtgcagaaaatcacttacggaaatttgctcatctaggcattggttctacttcctaaaaatctcaagacattctcacttccctcggcaggcagccgacttggatggagaaattgacttgtccgcatgttacgatgtcacagagtatccagttcagagaaactatggcttccagatacatgtgagtccagggatggaagtggggccacaggcttgacaggcagggatgcatgtcagagtgcctaatgtctgggctgggggcacttctggacaggcctgatgcagcgtgtatggtcagcacttagtctttcccactacccttgacacctctgtcctgtggcacctgaccctattccccaatttgtgatgtgaacagtacattagacgttagtatcttttttctgaagactgcttaaagcttttttgtttctgaaggttccttttttcttttgttttttgtaatgctggagttggggcaattggaaggatgtggggtatggggaataagaatgaaagtgttagtcaattatttacatccgctttttactcacttattcatgtgtttgttcattcatttacttacaaggctattttttcccaaaatcttgtgaggtactcagatgagcaaggcattgcactgttctcaaaaaaaaaaaaaaaaaaaaaatcttattggtaggacaaaatggttcttattggctgtttcttcaaaactgtgtggatcaaggactgcctgcagtcagccagactccaggttaagagcacagtcctcctgactgccacatctgcctccatttctttttttttcccccaagacagggtctcactctctgtccaggcttgagtgtagtggcacaatcatggctcactgcaggctcgaaatcctagactctaacgatccttctacctcagcctccagagtaactgggactacaggtgcatgccaccatgcccagcttattattattattattattattattattattatcattatttagagagacagggtttcaccatgttgcccaggagggttttgaacccctgggctccagcgatccacttgccttggcttcccaaagtgctgggattataggcatgaatcactgtgcccagtcctgcccccacttctgacaccagttgtgagtccggaggtttccaaaaccaccttcagtttcaaaaattcactagaatgactcacaggattcaggaaagtactgtctttacaatgagttttattatagagaaagtatgtaagtcagaaccagccaagggagagccatgtggagtagaatctgggactgggggagtcacagatgccaaaagtttctgcatccttggggacacggtgtcctcttagccctgatgtggggcagtgcgcagagcattgcccggaagcccacctgagccccggtgttgagttttaggaggctctgtagctgctgtggttgatggagttgttgtcctcatagttgaactccacctaaagcccttcccgccatggttggctactttcacatggcccaaaccccaaccctctgatttaatgggtttcctctaatttcctgcttctggccaggccagcctctaccctgagttgtcttgtcagcatgaagtgttaggtggggtcccagggtaccaccatgagtaacaaagactctagtcattcaggaaattccaaggtttggaagttacctcccaggagctaggacagaggccaggcctctctttgggtaaagttagttcgtcactcgcaagggctttaagatgggtggagagtgtgatgagtagagagctgcccccatggggctgggccctggccctgggacttggttctcacacaaggctagactctggtgggctcacctgtagcagggtcataccttcaaattttggggcccagaaactcaattttattgctgtgttgagagttgatccagtatttggggctcactcagtttggcccaacttagaggagactgaagtatagacccaaaggccagtgtgttcatttactaagaaaatcctggccgccagcccactgggctgctggctgtggcttcctgcgtgcaggcatctgcgagaggagctgagtcacagttggaggctacactgacagcctggcaccagggccgggtgtgagttgtctgctcttagtggcctgcactgcccaagtttcaaggctcctctgtcctcatccgctgtgggaggggtaggcgggcatagtgcccggtgagcctcctctcctgccgtccacctcccatcttcatgagcagctttctccaggcagggcacacctgaagtctgagaactcaccccgctctcctagtgacaaatgagggcatcagccactctcacccactgatcaacccctcctcacttcaccctggtagggcttatcctgatgactttcggtgatccccaactactgagagttctaaggaatgaggagatgcttccagtgtggagaaggcttcctgggggaggcttcctggagaaggatccctcaaggctcagcaggagggatgagtgtgaaagcatgtcccagactggactccagacctggtggcacagagagcacagagccagtctggggctagagtgctgggtggagagtcaggttggcgctggtccagcctttgtggagagcactgaagggtgttagaagatgccagtcagttgtgcgttcatgatacatgtctggcgggacatgcaggtccattagaaaggaaccaggctggcacggtaaagctgggcaagaaaggaaggagcagcacctgggaggaagaggtgagggcagggccaggacctggcaagaaggccccgcccactgagaagccagcagaagagctgacttcacagaagcagggggatcccctggaattccggctgtgatccatttgaggcatgatgggctctcagagaacattaggcagccgctgggaaagaaaattcagctggagaaaacagctgtatgtggagtgctgaggccaaactccagcaacgcccacacctgggggtggagaaggatggacccaggagaaggtggtacccccccaactcagctcacatggatatgagaactgatgaaggaggaccgagctgggcagtggtggtgtcttgatcgggcatgtggaggggcaggtcaggtccctcccagctgtgctttgtggcacgtcaggccggtgcgtgatctcctgttttggcttctggccaggccactagcacccatccgaaaaccatcctcatgattgcatcctgccgtcagcttccctactgacctggctgctgagtctgcttgtgagcagctctcggttcaaggctgcagccctcgcttctgttgggcaggtgcctgtaggtgcagaagcaggcctccagctccatgcaggccactggccctcccctgcctggtacccaggcaggtctgctcaggggcgcagtggtcatgtcccagagccatgtgctctttgctgctttgtcctacctgctgccccgttcctcgcccaaaacaggctcctcccctgctaccttgcacaagcaccgaggacaagccctagactccacctcatccaagcaggagtctagggcttgtctaggtgctccccaacccaaccagccagacgctgttcataccccttttgttacttctgagctgccctgtcccctgccatcaccttaattctcatcacttggacagctgcagtaaccacccagcaggtctccctgccttttctcagtgccaccaacaagaccctgataccccttgttcttaaccactccctgggcccatcatgccatgtgcctgtgtgagtgcagactgcaggtgccactccccacgcccaacacacacgcccttccggattccccacctccaccactgctcagcacatgctgattctgcccttcccccgaggctgggaactccttaaagaggggtgcagcatcctcctctgtctgagtggacaggctgctggtgcgtagtgggtgctcagtaactgtgagcttgttactgagagaagataccggatttaccattgccacaaatacacgtccctcccacagctttgacgtctcctgctctccagctccctcatgtcccagtagtgggcacatgtggcactcctagaagggtcacccagtcacagcctttctccctgtgggactttacccagtgcagggagcttctttggagatggagggcagcaggcaccctaggggacagtcactgatggtgcctcatcttttctctgtagacaaaggagggcgagtttaccctgtcggccatgacatctgggattcggcggaactggatccagaccatcatgaagcacgtgcacccgaccactgccccggatgtgaccaggtaggatggtgaagacaccagggagccctttgtgcctcttgtgggtgccactcccgccagggcagtgtcagactcaggtctgaagtctgagacctgagctcagtgcatcccagtctgctgctccttccttcctgtgtccttctgttgctcaggttcctgtcccaagtaatcagaacaaacatttctggttcttttctcttgtaagcccaagcgtttcatcttgcaggtagcatgtgtgctggtcattagaactgggctttggtggagaatcttccatctgtgtcagcaggcacttggccagaccagcctgagccccgcagtcggtgctctcaggccttgggctctgctgctctaagggtggccccatgtgcggcatccataggccacccagtgcttctttgtcttggccttcttttcacctcactcctacgtctgtttgatttctgtgcagccaatttgaaaaaccctctcctgtttttgcattctgtggttcatgtgtctcagattttgctttgggcttttttcctcctgccctgaaggttaaagacctagttctcattttaaaagatggagaatcagaagactcagacatatctaaaacaaaacaaaacaaaaaaagcagagaagattccagtgtgggggctggtcctttgatggccagaactctgctgtccccaccttcagagcctccacgcatctgagcacctctggtgccatttctcaggtcatgtgatgtagattacatctcgaatgtgtttcttgtgctgtgggttaggctgcttgggtgtggcaatgtcacagcgggggctgtccatggaagctttgacctaaaagcgtgttcttttttttttttttgagatggagtcttgttctgttgcctaggctagagtgcaataacgtgatctcggctcgctgcaacctccacctcgtgggttcaagcagttctcctgcctcagcctcccaagtagctgggattacccaccacacccggctaatttttgtatttttagtagagacgggatttcaccttgttggccaggctggtcttgaactcgtgacctcaggtgatccactcgccttggcctcccaaagtgctgaaattgcaggcatgagccaccacagccggcctaaaggcacattctgtatccaaacctttgccttcttcctgcggactccacacctctttacataagaaggaaagaactcctaaattgatttctttatagtcctcttttctgtgtctgtcatttgttcatgacttcatttattaaacaaacactgtctagtaaggccaagaggccgtgaccgggacaggttgccctctgtctctcaggatcctatgcagagagctggcttgttgtctagtgacaagtcctctttgtgcacagccagcaggaggcacccagagctgcagcaagctctcccaccctccaggggccacatcctgtggtggcctcagctactgcttccatggctctcccatcaggagcagacacccaagcttgacaagctaagtgctcttttccaagcacctttaggaagccaccagagcaaagtgagaaaggcctcagcttctttgcccaagctattggcagcagacagagcttatcacgggggtccaggatggggagtggtgggcagtgcatatgggtagctggcctgaggtcctctcctgcccctcttcccagccaggcctgggctcggtgctgtagattggcaatcctgtctggaagaagtcagctttgggatgtcccagggcagatgtcaggaatgcacctgtgcacatgcctgtgcctgcacacagctcaggagaggcgcctccacgcttgagtgcctgcttccctgcgtgcaggggctatgggcccaggggaatgaatgaggagacaagggtttggctctcacatgaaagttgacctggcagttggcctcctgactaagaattacttcataacctagcatatctgcatagtctggtagagtgctcaccctccaccagtttgttttcagcatttattcttcctctgtgtaggcttttattatttgaggaaaaatgtgagttttttagtgctgccaggcaaaatctcaaggaggcatgaaaacaaactgcagtctcagaagctgctgtcctcgtcctgctctcatcgccatcttgaagtcctggggtggggaagttgcagggtgcttcccgcctttggcactagaggagccttgtggggaggtttctcctagggagtgcggccggttctggtgtggctgtgactttggcggctgtcagggccaggctgggggcctccatgcatgccctgccctatgtgtcatcctgacactctccatggccaggagctcttagttcagtgacgtcacaagatctgccctgtgtcgttttcatccagatgttagcgtgctcttacagtggacacctgcagatcctgttgctgtgaagcactttgcctctcactcgattgctgcctggacaggtgacccttgctccaggtggtgacggcaaccatttcctcttttccttggttctctctctaaagactcctttccttttggccctaattgaaacacatgtgctccctggagctcctccttgggccctcactgtcctcaggtgggcttgcaactgccttctgagggcctgggtgagattaggggcccctcagtcagcctcggaccagctggcagtctgtggggcctatctctagagtctacaaacctttgcctcaaacactcccagcctccttgacaaattgccatcagcaatgtccctgtccctgccctactgcagacgaggcctccccaggaatctctgcttctagcagatggggactagacatggattcctcaggcagacctggcttcactccacttactgcagggcaggtagcagcaccatgagcacgacctgcgcagctcatgtcccgttgctggctgccgcttgcctgctcaaggtggcaggtaacccagtgtccttctccccttctgccttcctctccaagcctctggctactgcatggtgtgaactcgtggccacctgggcctcctgtttccctcacccttaggaggtcccagtctttcatactgatccatctgtcatgccagcagctggattgggcttttaaaacatagattcaggctgggcacagtagctcacgcctgtaatcccagcactttgggaggcaggcggatcacctgaggtcaggagtttgagaccagcctggccaacatggagaaaccccgtttctactaaaaatacaaaattagccaggcatggtagcgcatgccggtaatcccagctacttgggaggctgaggcaggagaatcgcttgaacccagcaggcagaggttgtggtgagccgagatcgcgccattgcactccagcctgggtaacaagagtgaaactccatctcaaaaaaaaaaaaaacaaaacatagatctgatcacgttacctgcttattaaaaggtaagcccttctagaaagtgctagttttccctcattctgtcaccactgtccagtccaggggtgcacagggcccaggcctcacctggcaggtacggtggctgtgcccaggtgcagcctaatgtagttcttggccctgagcaaggcagggctggcccgtcctgcctctgaggctgtgggagtcctgggactcccctggctccataccctggcaacgggaccaccacagtgagcccctcacagcctcttcagtcaagggacccccccagtgtcattatgtgggaaacctcagctttctgaggctcttttcccttcctttccccttcccctccccgtccccctccccctcccccactcagaaccagtttgggaagggatgtggggtaaaggcagagtattcctgtcctccctgcacttaggaagctgggattaggatagaaaaaggatgtggtgctcacaggggctgggttgtggctcagcattgccagcttctgcctggcaggccacaccagagccgcccctgacaggctatgtccatcctcctgccccacagctcgttgccagaggaaaaaaacaagagcagctgctcttttgagacctgcccgaggcctactgagaagcaagaggcagagctgggggagccggaccctgagcagaagaggagccgcgcacgggagcggaggcgagagggccgctccaagacctttgactgggctgagttccgtcccatccagcaggccctggctcaggagcgggtgggcggcgtggggcctgctgacacccacgagcccctgcgccctgaggcggagcctggggagctggagcgggagcgtgcacggaggcgggaggagcgccgcaagcgcttcgggatgctcgacgccacagacgggccaggcactgaggatgcagccctgcgcatggaggtggaccggagcccagggctgcctatgagcgacctcaaaacgcataacgtccacgtggagattgagcagcggtggcatcaggtggagaccacacctctccgggaagagaagcaggtgcccatcgcccccgtccacctgtcttctgaagatgggggtgaccggctctccacacacgagctgacctctctgctcgagaaggaggtaatagcctgggaccagatccccaccctgctcccagcagcctttccagagcatcagctgtgcccagctgtggcctgaggggttcatctagacagtcctacccgcgagggacttgcagacccctaggggagacagacgcatagatgagtcctcatagttgaggcagacctgagagctgtgggagcgtgccagtgcatgcagggcagggaaaggggccttccaggcacagaggaattcttccgatggtgggggcccctgccattgagaggcaagcggcgttgcagggcctagatggtttcctcgttctgactcccgatggcaggaggggcgcgagcagggcaaggcttttgcattacgcagccctggcttggacaggtcaaagctgtaggcagagaccagccccaggtgctcttacagtggcttggggacggccgatcagatctgaagccaggggcatccagcaggagatgacagctgggtcctaggtcatgaggatatgaagcagaagacagtggtgaggcagggtaggctgtggatgaaggctgccctgtgactgtcactcctccacgaggccttcagtgcacctaggtacatagatgaacaagctggcccccgaactataaaataagatgttctttcatggaaatgtatgcagaaatccagtctgcagaacttcagtggtagattgacatgtctgggcagggagtctcgtagctggggaggtgtagcgttacagtttttgtagaactccctgtttcactctccatttagggacagttttcaacactgtgtttcaaatgtgttctcttacgtaagtagcttgttaaagatttgccacttgggtatgcctcaagcttctcatcttttttgtattttattaactgtatgaggctgagttaccaccagcactaatacttgtactttttcattttcctcatccattaacaagtaacaaaggcaagatgaaataaaataacagttgaaactcacattacttcaggctaccaaaatgggccagccagcaggcgacacactggctcaacaatctggggggtcagtcttcactgtttaaaagtcaggggtcggctgggcatggtggctcacgcctgtaatcccggtactttgggaggccgaggcgggcggatcacaaggtcaagagatcaagaccatccggccaacatggtgaaaccccgtctctactaaaaatacaaaaattagctgggcatggtggtgcattcctgtagtcccagctacttggaaggctgaggcaggagaatcacttgaacccaggaggcagaggttgcagtgacctgagatcgcaccatcgtactccagcctggcgacagagcgagagtccatctcaaaaaaaataaataaaagtcaggggtctccccgcctctcacagcacagtctgtcagcaccctgggcggcactggcctgactgtccaccacacacacagctccattcagcacgagctctgggagcaggttgggtagccctgcacatggccaggcatcaggaggcacctgggaggtgtgtagggaagaggtggatggatgaatgagtagctgaagctgttgaaagcaagaagagtgtaaaatagcttactcatgggtatccacaccttgtttgagggaactgcgggaactctttttgcaaacagaactttgtggaatccatcatgtaaagctggtcaaatggagtggtttcagttgagaccatagtgggccctggagtgaggcctgcttggggccaccactcacagtggtccctgtagagcctagcctggcctgtgtgaccagctgaggacacccaaaggaccccatggggtgcttcctccagatgcagatgcaaaacccttgttccccagtggacacattccccttctcagaaatgaacaccccgtatgggccttggcacctatatagggcgtgcatgttggaaccttgagcaggtgtgggaagtatgtgggcatccaggggtgcctggagtagggaaggacaaggtagtcccttggtgcccataaggtaccaagtctgccattgttactgatggcttgcattggaaccttcacttccaaatgctgctggtaaaggccatatcagcacatctgctgaaatgtggagactccaaaactcttgggccacatggaagaccagtgaaagagtctgtgctgtgcagctgctttgtttatcattgtcattttgcataaaagtgtgtgtctttttgccaacagctggagcagagccagaaggaggcctcagaccttctggagcagaaccggctcctgcaggaccagctgagggtggccctgggccgggagcagagcgcccgtgagggctacgtgctgcaggtagggtggaggggctgctgtggcccatggtgcgctcaggagcttcagtgtgaagggttcatgctcaggcaggctaggagtgtgcaaaacttggctgagcaggggtgtctcccaggagctcatgcccctgggcttttctgccacaggactggacactcaatgtgcttgggggggtctgtttgtttttccctcctgatatgacattttggggaatctccctgaaacctctatatctaaggactttttttggtaataaaatgattttggtgacctttccctttgactctgaaagtagccaatatacatttattgtaaataccatacatttgcatgtgatttctcatagttttcactatagtaatattggacctattgtacagattgaagacattgaatcacacagcaagtccagtgcctgcttacaaccaacagcaagtcagtggcaaagctagtactggaccccattcccatctgtttctataccacacctggcaggcagagctggggctcttaccactactagcccaaccccgggatacctccactgagatcctgtaccacagagccctgatataggggtgtcacaaggctggagctagcctggcccaagggcgtgcctatgtctgctgactttcctgcagcgtgccaggccttgtgccaggtattgggcataaaacagatatactcttgtccccattgagtggtagaggagattgtgataggaagattgatatataaatactgcaggagaagtgaagtggggtaccagaacagggagcctaagttctcggcaaaggctgagggtataacattagaatcaaggtcctaggttcaagacttggccctgctactgacccccaaagcaagtgcatgtgtcccctcctctacagcggcagtctgctgcctgtgtagacttagacccagtgatccctgagggcccttccggctcttagaccccgagtctctgtcacgtattgtctacatttgcagaccgcagtgcgctgaccttggtctgagttgtcccaggcagcagatggaacaggggcactcagctggcctctgaccatagtctgcctctttgcagactctctgctgtttcttctcctgtgtgctccctgggccttctctttctttctgccccacatgccctagactctcctctccagcctcttctgccatagtcattgccatgccctgttcagacctggtgaacagggcctccctgtgggcctccctgccaaggtcatttgcgcttgccctccaggtttgaggagcatctttttaattcttgattgggcctcatcctataagaactggcttcaaatcaggtagtaaagataaaagttcagcatcccaaattcgaaaatctgaaatgctccaaaatccaaaactgaacgctgacattatgctgaaaggaaatgctcactggagcatttcagattttggatttttggattggggatgctcacccagtaagtagaatgcaaatattttaaaatccgaaacagttcttgtcccaagtattttggataagggatactcaacttgtactaagcagcggactttgcacattgctaacctaggaacctacctctgtctaacttgcataattgcatgagcctacactgaagcccctgttggtcagcactgggcaaagctggtctttaataccttttccctaagtctaataacctgtgacttctcaccaccctttatgctttggaaatgcttttaatcacgactcagaatgagcagggggtctgtggggttaagggtcaggagccagctactggggtgggtgctatactaactgctgggaggagcttgcatgatttggacattgagtgtgaagtgtaacttgaacttaacataactgagtgtcacatctgtggcttccccggccagcagaccgagagggagccataggcaggccagattcttaggctgggctcggctcactcttgtttgtgttgtttttccctatattaatgagttctgtctctgcatgcctttcagtgtggggagttttgtttcatttacgttgtgttttgtttttgcatgcttcactttttcttattttgaactccacaaaggtttgtttgttttgttgattattgtatcttactccatggttcccgttcccccctcgttttgacttcttacaggtagagattagttcttcctgttactctagaggactgactacactttccacaggaaaatgtttggatgtcaccttgctgacatctcccgagtgttaccttccttccttctcctcctgtcttagaaggaagtggcatcatttacctacaccttgtgtcctgcgcttgtttaggatttgttgtcaagactgcgtactttttgttttgtgaaacaaacagctgcaggtgctgtgctcctcccgcctgtccctcttcctggcgctctcttgtcctttagtctttgttttgcttcttagtgtgttccattattcagttttgtttggtttatttctcctagaagctgtttggttaaagctgttttctgatgttattgtccatgttttctgtttacctggaagcagctacttactaaaaaaaaaaaaaaagaaaatttgttggatttttttaatgggaaaaaaaaataaagttgtacaaaggataaaagccaaagccatcaaggagctttctgtggttgttcctggccagaggtgtgacactcagaactgggaggcccgagtgttactaaccagtatttaatcggtttttttaagactgaagtggccgcctccccatcgggtgcctggcagaggctccatagagtcaaccaagaccttcaaagtgagcttgaagcccagtgccagcgccaggagctgattacacaccagattcagaccctgaagcgtagctatggggaggccaaggacacgatccggcaccacgaggctgagatccggagccttcaggcacggctcagcaatgcggccgctgagctagccatcaaggagcaggcgctggccaagctcaagggcgacctgaagcgggagcagggccgggtccgcgagcagctggaggagcggcaacacagcgaggcggcgctgagcagccagctgagggctagcgagcagaagctcaagagtgctgaggccctgctgctggagaagacgcaggagctacggggcctggagacacagcaggcgctgcagcgggaccggcagaaggaggtccagaggctgcaggagcgcattgccgacctcagccagcaactgggcgccagtgagcaggcgcagcggctgatggaggagaagctgcagagaaactatgagctgctgctggagagctgtgagaaggagaagcaggcattgctgcagaacctaaaggaagtggaagacaaggccagcgcctatgaggaccagctgcagggtcaggcacagcaggtggagaccctgcagaaggagaagctgagcgccactttcgagggcagtgagcaggtgcaccagctggaggagcagctggaggcacgagaggccagcgtgcgcaggctcgcagagcacgtgcagagcctctgtgacgagcgggacctcctcagacagcggttccaggagctgacagagcgcgtggccacgtccgacgaggatgtggctgagctccgggaaaagctgaggagaagagaggctgacaaccagagcctggagcactcctaccagagggtctccagccagctgcagagcatgcacactctgctgagagagaaggaggaagagctggagcgcattaaggaagcacatgagaaggttctggagaagaaggagcaggacctcaatgaggctttggttaaaatggttgccttggggagcagcttagaggaaacagaaattaagctccaggcaaaagaagagattttaaggaaatttgcaagtgaatctccaaaggacatggaagagccacggagtacccctgaagagacagaaagggatggcactttgctcccaggccaaccagtccaagccactagggcacctctaggcctcccacacacaaggctcgaggatgaggacgaggacctgggggctcctccgggggaagagtacggtgatggcagccccagtagggaagacagcatggtgcccccaaagtcagtggaagtgcttgacagggagggccatcagcagggcacagccaaactcgaccaaggggcacctggtgttaaaaggcaaagaatccggttctccacaatccagtgccaaagatacattcaccccgaagggtctgagaagacctggaccagcagcacatcttccgacaccagccaggaccggtcaccctcggaagaaagcatgtcctcagagcctgcacccagtgtactgcctgcaactggcgactctgacacgtacctctccatcatccactccctggagaccaagctctacgtcacagaggaaaagctcaaagacgtgaccgtgaggctggagagccagcagggtcagagccgtgaggcactgctcgcactgcaccaccagtgggcgggcaccgaggcccagctgcgtgagcagctccgcgccagcctgctccaggttggcgcactggcctcccagctggagcaggagaggcaggagagggccaggagggttgaagggcatgttggagagcttggggacttccaggtcaagaatagtcaggccctgatgtgcctggaaaattgccgagaacaactgagatctctgcctagggccagccaggaggatgagcaggacgcacgcgcagcctccctggccagtgtggagagtgcactcgtcagcgccatccaagccctgcagcactggccggccccagcccatggcggggcccgtgcacagctggagacaggtggcaccgaggagaatgggaagcctgcctccctgcagcagtgctcccagtctgagttgacagagcaggagcaggtgaggcttctttctgaccagattgctctggaggcctcgctgatcagccagatagcagattccctgaagaacacaacatcagatgtctcccgaatgctccatgagatttcttggtcaggacagccaccgatggaatctgctggggcccccgtagacacctgggccaggaaggtcctagtggatggtgagttctggagccaggttgagtctctgaggaagcacttggggacactgggaggagaggcagtcggtgcctcaggagacgggcagcaaagcatcccacagggcctggcccccatcctggccaatgccacatgggtcagggcagagctcagctttgccacacagtcagtgagggagtcgttccaccgcaggctacagagcatccaggagaccctgcggggcacccagacggccctgcggcagcacaaatgcctgctgagggaaatcctgggagcctaccaaaccccagactttgaaagagtgatgcagcaggtcttggaagccctcaggcttccagcgggccatgaagatggtgttcagctgtcctgggacctgagccccttaggagaagtcctgggccgagactcagacagctctcaggagcccttcgatgtgtctgaccagagccctggggcctttgttgctattcaggaggagcttgcccagcagctgaaggagaaggccagcctcttagaggagatagcggctgccttaccatctctgccacctgtggaatcgctgagagattgccagaagcttctccaggtgtcccagagtctctcgtataacacttgtttgggaggcctcggtcagtattcttcattgttggttcaggatgccattattcaggcccaggtttgctatgcgtcctgcagaatccggctagaatatgagaaggagctccagctctgcaaggagtcctggcaaacccgggagccctcctgctcagagcaggcacaggcagcccgggccctgagggaggagtatgaggagcttctccgcaagcagaagagcgagtacctggatgtgatcgccattgttgaaagggagaatgcagagctcaaggccaaggccgcccagctagaccatcagcagcagtgtctggaggatgcagagagcaagcacagcatgagcatgttcaccctgcggggcaggtatgaggaggagattcggtgtgtggtggagcagctgaccaggaccgagagcacactgcaggctgagcgcagccgggtcctgagccagctggatgcctcggtcagagacaggcaggacatggagaggcatcatggtgagcagatacagaccctggaggacaggttccagctcaaggtccgggagctgcagacgatccacgaggaggagctgaggaccctgcaggagcactactcgcagagcctgaggtgccttcaggacaccctctgcctccaccaggggccacaccccaaggccctgccagcccctgcccccaactggcaggccacccagggagaggctgactccatgacggggctgagggagcgcatccaggagctggaggcccagatggatgtcatgcgggaggagctgggacacaaggacctggagggcgacgcggccacactgcgtgagaagtaccagagggacttggagagccttaaggtcttaacgccccattcaatttgcagagcagatcttccttgataatggggtgggtgtggggacgtctggctcagctaccgtgcaggcagaattgaggggatatgctgctgtccctctacttgctagccatggtgtggtctcagcagggcctgggccgcaggcttagcctcttgttcggcatcccccagtgtcctccaccaggaggagaactagcaggagggccgccagggtccctggtgggagaggagcacgtagtcttcccagcacttccctgcctgcctaatgcggcctctccgtgttcctgagagcagcccccaatccccttgccagccttgcctccttcctgcccctgccccgggaaccccgtctggcccagtcccagcccaaatctgaggcagctgcctgaggacagccttgtactcacagcaacaccccggagagccagggcccagttggagggcagtctcctcctgattgccctaggagagcacagtcgggcggagggtccctctctggaactggcatttgatgtgtgctctggtgagaagaactttcccacggagcacagcctccagccactcctgtccccttccccaggacctttacaagtagattttccccagaactgtcctgcatccccgcccctgaggtcctggagcacaaaggcgaaatgccaggccctggaggtggtggtgggctgagtggaggcccagctgtctggccccaccctttgtagctgcaggccacacccaccatgtgtggctgtcaagcatcatcccttagactcaaaagtttaccatgatacctgtgcccttatgttccttccactcaggaagctgccccagtaaatgactaggatgactaggcccctcaaaagccatgttcaggtggtgccttccacgctcatgtggcagagccaggcgcgcacacagccagcaccattgtgctgcaagctcctgactcccaggtggctgccactgctcctgcctacacatcctcacagccactgtctagcaggacacctgtttttcccagcccgttactcctgtagctctgaatggaaacagcagctcacatgtcacctctgtgtgacggactcggccccacccagacacacaggtgtggttgtcagcgagcacctcaggagaactgagaagctctttttcaccattctttccccaaatcagtcaaaaccttttaaaaaccattatgagttgtgagaaggtttcaacagctatgttttcaaagtgtgtgtatatgatggcactgtggtcagttcaccaagagcagcactgagatgggtggatccaggtgcaccttgaaaagttaattgcacaaacctttgctttgaccccaaatacgcttgctagtgcccttccctgcagcttcccagacaatcagcagggtccatgggggcagggcctgggcacagcaatgccctgcttcctgtctgcatccataagaggcccctccacaccgaggctgctttaggttagccaaccaggtgcaggggaggccccatgcaggtgccattataccaacagtgagcaagaaatcagaaaaaagaggactgccttatgttgagaactgaccagagattgtgctgggccagtgtcactaggagggagaaacagatgatgcaggtcgggatgaggcccctcccaggggcttggacactgtccactccctgctgccttagctgccgttgcatagtgtcccctcctgtgcctgggagcttctagcccaggtgtggtgttctcacccacccctgcagacttacagaacttgtaaatagacagcaccttgagatttcatcactttatgcagatttccacttgggtcgttggggacagggtcttggcctaacagccgtcctctgacatccacaggctcccaccacaccacgattgcagtcatcggggaacttcttttggtgtcaggaatgattggcttaaattaacatttgtttgcaagatcaattattttttagcatatagtttctctccaaagaagcaactaggtctttaaagatgtcccagtgcttctgttagatttttgactcttacctgcataatattccaaagcactcagatcaaaataagacttttcccagcaagtagactcaaagaaaaaaaaaaaagacttaaaagatctattaatactagttgtgctcgttttagcagcatatatactaaaattggaatgatacagagaagattagtatggcccctttacaaggatgacacacaaattcatgaagtattccatatatatatatattttttttttttttaattaaaaaagacctattagttaaatgtgttaactgagaagccacatacaaacagaagcgagtgggaggaagaaagaagagctcaaccttggggcctgaggaccaggagctccagagctccgagctcctgcagccgtcctgaggtgtgagggtggcagaaagagacagatgcttccaggtggagccgctgggagaggggatgggacgcctagttaatagtggcaatagctgagacattcacccagagcagcacataggttgcagtcaagtccagactgaccacgagtttggaaatactgcctgaggctctcagagttggccatcaccaaaagtgggcccagagaaaaatgcccaggcatgctgataggatttcttggtatcctttcttgaatccacatgcaagaagattaaccaagtggtgcaggctatcagcccagagtggggaaacccccacacttgaatttggaatggaatgtggccacgttcttccagtttttaaaactcagcgagaggcccagtcccttctctgaagcagaccacttgaaggatttagacagaaagtgtgtgcctccgtgctcaaaatagctgcacacccacccttcccggcagctgtgcagcacgctcacctgctttgttagtgagcacagctctgataaccaggcctgggcttcctggtgtggcttgctcccatcctggggcatgcctatgtcgctctagggaggcacaggagagtttggaaagcaggtctcctgtcatgtacttgttagagttagcagaggtgctaagtcattggtgcccttctttaagaaaagagtaagaaagaagacacaggctagaaggaaggggagcctgtagcctgatcttactccctcagtcaacacctgagcattaagtgaccagctggaggttgtcagctggctagtggcagagtcccaacccccagctcccagaagtggactctatgtacccccaacccactgtgggttgagaggctcccagcccggtgcccgccaggccactccctatatgtggaatggccttggttccctccagcagacaagtccctcatccctgttttacgggcctttcaccgtgtccctccagaccagacacagccagcctctgcccacgtgctctctcttccttcctgtgggtcccacctggcagcaacgcaggaaggtccagggttggctggtttccatttcatagcagcctgtccccacctaccataccaacttctcccaggaagaaatggggcacagtacagtcacagaaataagaggtagagttgactggtaacacccttttctgaatgctctgatggcattgctgagaatccccagacagccccagggatcctgttcagggcgcccatggtggagcaagctcagtgaatgcccagtcacagctgggcctggacagggtgggattcctggctcctttatttaaaagggcccccaacttagaggtaaagaaagaagtcgatgaagtcccttttgcattttgcaggccacgtgcgagcgagggtttgcagcaatggaagaaacgcaccagaagaagattgaagatctccagaggcagcaccagcgggagctagagaaacttcgagaagagaaagaccgcctcctagccgaggagacagcggccaccatctcaggttggggggtggggtaaccctgagggcagggtgggtggccagctttttttgagctagacacacaactcagaggaatggcagcctttaaattgccttttggctgagatgtaaacttcattgttgaagggttctttgactattcactctgaggcaaaggccaattttaggtcccttttgagagcttgtaaactgagagcgcacacttcgacccctgacagccccgtcgtggccggctgcacacaaggagctgtcccaacctgtgactttccagttccaacaagtagactgaccagtgtcagtccagccagtgactttccccctgacagacacctgtcaacgtgggaccacctctggccagaatgcccctgccgtcagcgtgaagatatgtagcttcaccggcaggtggccctaaacaagcacgtcccctccgccttgtgctgccttccctttatgtaatcgccacctcagtggtttgttaatttagttccaaggaagaaaatacaccagcacaaaagcttgcttgttttataaactcatgttggaatttaacaatgacatttatttaatcagtttggttttcttctaacaccaaaaaaaaagccaaacgtgcattccttccagggggagttcatgaagaattctcccagcctgcacccacctcagagaattggttcatgaggggccagcctgtcatgcaaaatccaactgctgattgactaagcaagcatcagcagtggcaggcgccatcccattgtgtggagctccccacccccacccctgtcagcaggaagggcgtggtccctcggtgctgaggccgtgtccttgcctgcagccatcgaagccatgaagaacgcccaccgggaggaaatggagcgggagctggagaagagccagcggtcccagatcagcagcgtcaactcggatgttgaggccctgcggcgccagtacctgtaagtggctgggcctgcccatctgcccttgggagggcccctctggggtgctgaccaggccacagctgggcccttcctgtgtctttgcagaggcctccagaagtggggcctggggcccctgggtgctgagggcagctcagatgccctcttgtccagtgcaggatatggcccaagtggggcctcctttattcagagagactgttcctcgaaatgccaagaacgagatgtaacaaacgaaatcttaaactcccctcttgtccagggctgatcccagcaactgcccagatgtgttcttcgacagctgccctgctagcccaccaggagccaggcagccgggcttggtcgtacagggcagaagtgagaactagcactgtggtttaaaaccacacgtgctgattccctctgcacaggcaggatagaaaaataccagaaaaactgctgtagacttttttcacttggtagaattgacacagccagaagcccacagattggccaccatgagcctcacggcactcaggctctaccaggagcctttatagcatagccgaagccaggggccctgcctcaggagctggcagcagtcagcagcaccctgtagaggctcacgctgaccttggtcagagcagggtggcccacctggaagcccctcatccctggttcacctgcaggaggacggccctcctggatccagggtggcagaacagcctcaggaagcttgggtttttgggtcttgtgtagagcctggtcctggctgtcagacacagatggcttcaaaagtgggtttactgaaaacaaattctgagtcagaagagagttctagaaatgggggttctgtgtggctgcagactggactctgtcctgactggcatccccagagaagtgctagctgtaggactgtcagactgtgagaaaggaccagggaggggcgtgaggccatctctgtaagggatcccttactctgtatgacccaggctgattaagacaacagactgtgtgggcctgacctgtgcttggctgtgtctggtgtcaaggagggacaccggcctctgagaggccttgtccagaagcaggcagaggagtgagtgctgccctctccccagggaggagctgcagtcggtgcagcgggaactggaggtcctctcggagcagtactcgcagaagtgcctggagaatgcccatctggcccaggcgctggaggccgagcggcaggccctgcggcagtgccagcgtgagaaccaggagctcaatgcccacaaccaggtgagcctgcagccaggtgagcccaaggttagtcaggggcactcaaggtcaggtagacccatagtcaggtgagtccacactggagctggagccaggcctcaccctcaaagtggcatgaaggtccctgaaccacagagtggttacctgccccagggcttctccctgccacccagcgtggccatctgtgttgtcagaaacatcaccgcggatagctagagcaacgctgtactgccacgtgcaccacctgcttacacatgacatcactcttgctttgaccctttctgagactctcgggtgtcttggtgtcttctctgtgctcctctgaacctctggctcactgtttctgggcagggcctggcagggtcatcccaatcctccaggatcctgtcccccagggattgagctgacacttctcagggtcaggcttacggctcacatttatttttgtcagattttttttcttaagatttgcttgctctgtccgggcgcggtggctcacgcctgtaatcccagcgctttgggaggccaagacgggcggatcacaaggtcagggattgagaccatcctggctaacatggtgaaaccccatctctactaaaaatacaaaaaattagctgggtgtggtggtgggcgcctatagtcccatctactgggaaggctgaggcaggagaatggtgtgaactcgggaggcggagcctgggtgacagagcgagactccgtctaaaaaaaaaaaaaaaaagatttgcttgctccttagttaattggggtgcatttaaatcctggctaatggaaaggttcaagccaggattcgttcaatattggcttttctgtgggcaccaaattaaaacagccctctatgaccctgccctgcacaaacaccccctggggctgggaacatagtccctttctcacctgaggccttcccaaggggcatggctgctgcacagggctgtgtatgaggctgctcaggcaggactgggtccactcactgctgctgtggcttaaagattaccccacaggagctcagatgggaccagccatggaacagattgacactagttattgtgacagaaaggaattaagggttatcgattggatcctgcctacgcagttccacagatacacaaagaacctagggaaatggccttcccgggttgtgtcatgcgacttggccccaggcagctctggagtgtcactgttgtgttgctgtcccccaggagctgaacaaccgcctggctgcagagatcacacggttgcggacgctgctgactggggacggcggtggggaggccactgggtcaccccttgcacagggcaaggatgcctatgaactagaggtaccatcaggagccaggccctgcctgactcagctctgcacccaggaaccccaggggagtgcagcatggcccctgtcttacagggttgtgggaggaacagacctgagacagcaggagtcacagggtccaggaagatccaaatcacccgaaggcggcgaggagcagtgagctgccaggtggcatgagagccactagccgagtggagccctcgaggggctgtggggatcctgaccccatctcactccacccactcccctccatttctgctatgccacaaacactgaccactcaaaaggacacgttctgtagccatgtggctgctgcagctcaggtcagggaggctcgctttatgttagaatgatggattctggagtatagggtgtccttttaggaaggcacttagatttctccacattcaattaaaatttcaccctaaaatgtgctaaaatttcagcactcagccagccagagctcacccagctgggctggttctggtggctttgagctttgtctctgtcgtggagccgcctcctggcagtgacactgagaggccaaggctgggagggaccagtgcttggtgtgatcagctcctgccccgagtccaggtgttgggccgctgtctgctgtgcctgtgccttgtactaaatgagtgctttaccaaaagggcgggcaagagaggctgagtgagtctgacacaagtgtcagtggtaacatttcctgattctcgcgggcttggtccccagagacaagcaggtctagttcacagcaccccaggctgaggagggagtccttggcactgggaggaatcacggccatttccttcctcttcctgtttctgtatgtgaggctgaagctgtgagcggtgtttaaacgatgcttgcccgcattgggcaccacgaggctgccctgctcactggtgattggagagccctctgcacgcttcagcctgctgtggagactctggaggtttctttgctcctgaatattggtccctgatctctctgtcattttaggtcttattgcgggtaaaggaatcggaaatacagtacctgaaacaggagattagctccctcaaggatgagctgcagacggcactgcgggtaaggccaccgcaccacaggagggcgggtacgggaacaggctctaggtgacatgcgcctcctgaactcaggctggtgctcagcgcgggctcttctgaagcagattttactcttgtgaggaaggaggtttccaaaatcaagccctcttaaaagaccagcctgcaggcaggtgctgtgggaacgtggacatgagcaacctgcctggcctggctccagcttcagtgtgtatgtgctttttgtgtgccttgggaggaatgttccagagaaaaggcctgtgaagtgaggcaaggcttgacttccatttgagccgccccctggcttccaccagcctcctccagggactcctggagtcaggggagatgacagaatcattggtggtcactcagtcacctagggaatctaggacacagagaggatttccaggctgaagcccacaagggaggggcctgggcactcagggccacaccaggctggtcgggcaatcccggaactgcctcctgcactcaccgggcctggagattatcctgccatgtcctgatggctgtgcccgtgtccttaggccccgtggtttttcctctctgtccactgtctgcctctagaagacagaggtgaacaagcctcctcttccgcccacagcaagcctccctaccgtgttcagtccccaggaagacaggccatgttgtatgtgctcctctttcctggatgtaactaccattctctgtcatttcactcccaaggacaagaagtacgcaagtgacaagtacaaagacatctacacagagctcagcatcgcgaaggctaaggctgactgtgacatcagcaggttgaaggagcagctcaaggctgcaacggaagcactgggggagaagtcccctgacagtgccacggtgtccggatatggtgcgtcctcgggtcatgccctctcggttattgctggggggcttatgggggtttggtcgtagaggtttcccggtgcttgacttgaagcagaagagtcccagtgatgcttgtagacccaggcatcccagtggagcaggagcaccagcttcacacggctgccccagacaggccttgctctccccatcgcagcagtggatgctgtgctgattgctctagggagaacccatagtatcagcataatattttcgaaataataacaagtcttatttttctaaagaactcaaccactgggcagaagtagctctcactagctgcttgatcctaggatttgactataatatctgtaaaaggccatagagtggagaatgggagggagctccctgctttctggaatgaacaacagaactggccctttttttcttggctaaaaacatttaggtaccctgtaaaaaatagatggcaggaaggatgaaagagttaacattttatcaagcattttcagctcatacgtaatttttttttttttttttttgaaactgggtcttgctctgttgcccagggtggaatgcaatggcgtgatttcactgcagcctccgcctcccaggctcaaggattctcccaccttagcctccccagtagctgggactacaggagtgcaccacaaaacacctggctaatttttgtatttttagtagagacagagtttcaccacgttgctcagactgatctcaaactcctgggctcaagcgatccagccaccttggcctcccaaagtgctgagattacaggtgtgagccactgcacctggccagattatacataatttcatttgaccttcatcttgattttttatacagagacgcacaaacaggaaaagatgtgctagctcactaatatcaaaaaagaaaaaatcaactttttttctgtcaggcaaggaatagtgattatgtactgacagatgctgggaggaagacttcatttttccataaataccttgagtagtcaggcttggtggtaggcctggctacccaggaggctgaggtgggaggatcacttgagcccaggagttctaggcagtcacacacaaagctaagtcgatcaggtgtccacactaagtttggcatcaatatggtgacctcctgcgagtaggggatcaccaggttgcctaaggaggggtgaactggctcaggtcaaaatgaaagaggtcaaaactcctgtgctggccaggtgcagtggctcacacctgtaatcccagcactttgggaagctaggtgggcagatcacttgatctcaaaagttcaagaccagcctgggcaacatggcaaaaccctgtctctacaaaaaatacaaaaaaactagctgggactgctggcatgcacctgtagtcccagcgctacttgggaggctgaggtgggaggatcacttaagcccagcaggtggaaatggcagtgagccatgattacactgctgcactccagcctgggtgacagaatgagaccctgcctcaaaaaaaaaagaaaaaaaaaacctgtgctgacctgtggtggaatcacacctgtgaataggcactgcattctagtctgggcaacacagcaagaatctgtctcttaaaagaaacagagggcgggcgtggtggcacccgcctgtaatcccagcactttgggaggttgaggcgggtggatcacgaggtcaggaattcgagaccagtctggccaacattgtgaaaccccgtctctactaaaaatacaaaaattagctggacatggtggcacatgcctgtaatcccagcactttgggaggttgaggcgggtggatcacgaggtcaggagttcgagaccagtctggccaacattgtgaaaccccgtctctactaaaaatacaaaaattagctggacatggtggcacgcacctgtagtcccagctactcgggaggctgaggcaggagaatcgcttgaacccaggaggcagaggttgcagtgagctgctgagtttgtgccactgcactccagcctggcgacagagcaagactccatctcaaaaaaaaaaaaaaaaagcaaaacaaaaaaccccacacatgcacaggatgtgtgatatgactcagtatctgtttgtgttacaggtacttaagtagacatttctaagaagcctaaaggactgctatctgggtgggtggacaatgagaaggccttggccttatcatcttgctttagacagccctgtgctaccaggaggaaggtagagaatcatggataatgggggtaggggtctgctcagcattgaggtcccacaccagagtgaggggaccaagtccctttgaagggaatgctgttgtgggctacagtcacagtgcaggaagccctggcggggccccacatacacattctcccattgtgctggtgttttatggtggtctgaagagatctagcatgttttatggttattggctttgaattcccttagagttgtttaaggaattgtcctaagtatgctgcagtaggaagcttgggaaatgtttcaggatttagtctggttccagagggttttagaaagcaaaggtaacaggtctgtttgttttcattatataccgcagatataatgaaatctaaaagcaaccctgacttcttgaagaaagacagatcctgtgtcacccggcaactcagaaacatcaggtccaaggtgagtctggggtccagccccctggtgggaggggcttgagggacactggggagagtagcccaaattgaagtatgagtgctcccatgggccacagctgccaaagccccagggcccagcactgagccagcccgagctcaccctgctgggctggttctggtggctttgagctctgtgtctgtcttggagccacctcctggcaatgacactgacaggccagggctgtgaagagcagtgcttggcatgatcagctcctgcctcgaggccaggtttcacccagccctgctcatgtcggcctgctgtcagctgtgcctgtgttgttccttgcacatcactgttgtgacactggtgccgcctccaagagatgatgctgcctgctcttgttccccagccaggaagcagtacatctttagtgtgctgtccagagccagccatgcacaggagggcgggcggaggtgggagcggcaccgcgtgtgtttgggattggttgtgtgtctcatgtctgctctctcctctgacagtccgtaattgagcaggtctcgtgggatacctgaaatgcacccgcttcccggcccatgcaggaggtaaaccgcctctcccaccgcctgcatgcactgctcacacccccatggcaaacgcctgtgtcatggttactttatttcaattcatcctgctccaacaaacacataccaaatccaagtgaggtttctttaacctgctctggggagttaattggcactctaacctcttaacagagatgaccctggcagtgaggtgctcctctagcctggtgggcaggcagagagccaggcacccatcagcatgcatgttggataatctgtgcacaacggctgaactcactccaccccctcaggggacacttgtcttgccctctgtcacgaggtggaatttacagatgtccacactggcaagtgaagtctaccgtcaccaaaggcctcgcccacctagtgagccacttagtggcctctgtctgtcaaggctaacagggtggtcattctaggaatggataaaccaggactagagcttggtgaagatggttcagaagagcgtgataactacaagcaataggggcgaaatatttaccagtatttttttttttaataaaacaaaagcttctcactaggtgccattgaaggccctatgccagagaggaggtgggggagggcccatggtgggagacaccctgagaatgagtagttgccggctcagtagcttgatctcgttcatcccggaatgagaacatggaggaaagcaagaaccacgtcttcctccccatgctggccctttctcaggcacacccacagcaccccgccgtccgaaggacttcatcctgaggcttggttaaagagttgaaggttttaagcctagtcagtttggttttatttttctacagttctaagtcccctatacccaaatatggtttaggcttgattgaaaacttagcttgggcatttttctttaaacataacgttttgtttagcaaaaggaaacttgttcttttttggttcacggttttcttactgaagattctactacttatttgaggctaaactgtagctagtatctttgagcttttcttgaaggagtttgaagttcactattagtgatttgggcttttggaccatgtctataagtgacatgggaccggctgtcactgacaggacccttccagggaggctgtgcaacacccacgggcccctgacagtaactctgtgcagtgagtgggtgggggcctctcacagtggctgggaaccagccagagcagggatgagggagcagactgtctgggccccagggcagactgaaaaggatggagagaaaccccaggatggggtcctcctccttatgtgtttttaagttgatgtttggcttggctgggtttccgtaataaaaatccttggagtgcagggctagtcctgctggccccagcagaaagtcgaggacttcctagatgtctgtggtgcaacagggcaggatggggccgtgttcgcgctcccaggagacattaggaggcacaggcatgggtgggtgtcatccttttcctcaactgtatctgaagactccacccaacccttcaagaagatggaaatgcagttgcccagaaaccgtacttctcagtggtgttttttgatgtggcatctgatgtgcactgatctgtgtcttttgttctgttctgtttttctgtcctgcctcgctcgaaaggaccgcaagtctcagctgctacaaaatcaaagacagcaagttgcttaggagcagcacagccttttctgggattgagaccagagaatgcttccctcggggttcttaaggggcccccgtgtctgtggtcagctcagtatgtggggctacaggaggcactcagtggagacaacagcctagggggagatgaaccccagagggagctggctgagccttgggctgagcagccaccgggagagaatccagaggacgtagagagagaaacagcctcctgcagccagtgtgggaataacgtaggggatttcacttacttcccacccttggaattgtagcaagcccagcatcacctgagcctgagctctgccctttgtcactggggcaggagccagtagcgagcatgctgggtgctgtggctgtcagggcgctcccctcccctgggcctgctgtagcaggaatctggggcttctgacgcagtgcctgcaaggagcaaacccaggccttaggagtgatcaaactcactacagtcctgacagaaagtccccaacaagcaggaaccgggatgtcagtgacatcccccagccatgctccggggcctgcctctgagtagcacttaggctcagggctgcctgcctggcttggccccagccccttcaatggtgaccagatgtctacccaggtcctctgcaagactgactgctgtgagaaccctgcactctgtggggagggaccccccaagggcacctggaagcaggcatgggtgttgaggtacatctgggctcagaatgggagatggattttccccccattcccccagccactctctgtggcaggcttccaaagaaaccctctcagaaacacacaattatcaagctgtgacaactgcttgaggtgaggctcacctggaccagtgaggttgtttgtttgttttgagacggagtctcgctctgtcgcccaggctagagtgcagtggcgcgatctctgctcactgcaagctccgcctcccgggttcacgccattctcctgcctcagcctcccatgtagctgggactacaggcgcctgccaccacgcccagctaattttttgtattttttagtagagacggggtttcactgtgttagccaggatggtctcgatctcctgacatcgtgatctgcccgcctcggcctcccaaagtgctgggattacaggcgtgagccaccgcgcccggcctggaccagtgagttttaaaatgcttagcagcagaaccctgtatttaaaaatcacattgtttatttatttacacagacacatagctccagaatatagcaaacaagcaggtctgttctgggtagagctgggtggggtgggggacagtggagctcccccttcccttgagctttggagggagcctcaagctgaccagcccatgctcagtccccagtctatcacaccagagtctccaggacagtgccagagtgtgcctgagcctaagctggcgacttcccagtagatggggtacagcctgcagtttcacgttgctcaggtttttggttgaaactggtagaatcaggcagaccctgagctagagcccatcccttcagcttccagtttctcagtaaagcctgtacctgcaccagctctggcaagggtaagccacagggagtcagcagggctgagtgtgatggcgacacttagcgtgaagagggagataagtgaagagccacagcactttccagtcagtactggaatgcccttcatttccagtcattctctgaaaagtgctcttccttttcttattcagaaattaaatcattgaggaaagtctgtaagaatgagatgggaaatactctgtcccctagttagtaagatctcattcatctctggacatacagatttaagctttagcaagattccacgtgaacagagtattggttttatgttttgaaaatcttactagatacgttggcgtgttcccacatccccataacactcacaggcctctgatgagggaatgccagaaatgggtctgagggcagcaggtgctgcggaggcactgtaggagcgaggccctgtcccgggacacccatcctgctggggattccctggagcatctggtcctcctcagctgaggctgtcaggtgaagaatctctggagctggatgtggacaaatccattcacaagacaagacacggggatgggcagtctccttgctcattgcactgttttccctggctggattcgtttgatcactgcttctctaaagagccctaagctcagaatttagctgcttaaacacatggtcttgtctctctgatttttttttcctttttcatccaagtaattttgtgaaggggaaaacatcctccaataacagcatttcccggggactctcctcctggcatgcccactaaccgcacctgcacccggctctctgactgatgccggctccaccagcggtccggtctggtccggtccggtccagtgcagggggtctaacggtgtgtttattttctcctcctgctctgtctctacccagagtctgaaggaaggcctgacggtgcaagaacggttgaagctctttgaatccagggacttgaagaaagactaggtgtgtcccatccaagttgagcacgcgccttccccagcttgcagcagcacaccccaagcgctgcttttcacctgtacctttgttttattattattattattattgctgttgttgtcatcgttaactgtgggcatggaatgcgtgaggctggcttctgggttgtccacaccactctctgctgtgttgacttcctgttgtcttcatcaaagcttttttccgtggtattctaaaattaggccagcagtgggggctgggagggcatctgtgttagtcctttcctggctgtgacccgccacactcactgtcagtattaaggcccagcagcctgttgataagctaccctgtctcaccatgtgctggtgtggaaacggggcccagccagcacgcctcaaggtagatggaatccccactggtcagagaaaaagctatgcggacactccagcttggcctgggtcacagcactgactcctcacccgctagtctggctgttaagaggagaaagtgcactgccttccagcccaggaggaggacagcattttgtatttgttccactgatgcagcttagaaccacacccctgagagtcgtggcaaacctttcacaacctggaaaatgttgaaagcaaccattcctatttttgtttgttttttattaaatcttgcacaaaatccccggcccctctccttccttccttccttccttcctccgctcgttcctttcttggtctccagtaaccctggtcttttcataactgctcgagattgttgacctgcagcccaggtttcagactctgattgcaaaaaacaaatgaattccccccaggaatcattcaaaatgggggaaggtttgggggtttgggttttttttttaccttttggaaaagaaaccgtcacattgctttggaaaaggttgagaggagacccctgttaagtcaagaagaaagtacagaggatgtcagaatctgatgagaacagcacattagtgtttattgagactccgatcttaactctcatttaattaatctgagctctgaaaacctatcttgcagcatttatctttaaaagagcctggttaaagtaaacctatactaacaattttgctttttctaacagtttgaggaagacctttttaaccaccacaaaacattctatggcaattcttgaaaatctcttaaattggagtctattatggccccatgaaaaccattaatcccattaagatagggagtataaacccctggctggtggaacaggttctgctactttaggagcaaggtggggtgtgagtagatggttttcatgccaagaacatgctttcactttgtattcatgcttgtgttggtgtgatggtctctgtgggtgggtggatgctttgggcgttgaaatctagaaatcctgttgctcagtttctagatgaagtcatgagcaaggccatcagtggagctctggccccgcccccaatgtgcagaagggccgggagcaaggcctggagttttcatgtgttttcagacccaggtttaggtgctctcttctcactgaaataactaagtgctctccactggcatcgagccctttccacaagtttttaaggctcttaacccacactttcactcctctgctactagtcttcagtgttgttaacagcaagagaaaattgggtttgtttaaaaatctacttctctgaggtggcacagttgcgtagctgtagtcccagctactcaggaggctgaggtagtaggattgcttgagcccgggaggtcgaggctgcaatcagtcatgatcgtgtcactgcactccagcctgggtgacaaagcaaggccccatatcagatatagatatacttatcagaccccccctgaccatttagattggcagtgctttgagaaatgcactatgacctttctgtgtcaatgggaatatacagaaggaacattcgggaccccgctgtcccccacagcctcattgttgtctccaggacactgctgggtcacacgaatgctccaggacagacagggacctggagtgcatcaggatctgaccagataggagtttttgcctcgtgtctgggtgctacgattttgtgccgttctctgaggtccaccacctgcccttcctggcatggtttccttcgtgaccatccctgctgcccctgggggtggaccccactggcccttctgcagacagctccctgccttctgccctccagggggttctggccagagtccatgcttggagacaggatcatctgccttcagccctcacagtgctttaaattaaagcaagtttgcccataggacaaaagagcatttgattcccttttttctgtcacatatcccttgaggctggacttcaggaatcctggaaaattaatatgagtgcagcatgtgaggggtcagagacaggccagcagggcgtctgcattcctccctgccacaggtctctccccagaggctggtttagtgtagggtattgccaggaaacggactgaggctgctttgctaagagctcctgaaaatgccctgggcctgtcctggcgtttctgaagagccctcatacagggacagccaccatctgggtcaaggaagtctgggttccctgctggtgggctccatcctgcgatggagtgaaccaggcgagaaaggatgacgatgttcttcatgttgcacctggacatgccccaggaacagagacttgcccaggtggcaacactggcacagatgttgacggctgcccaactggtgccacactgagcagggagccttgtgctgcacagggctgggccctctctccagtttccttcctgcaggcatccaaataccctggaagggatttaacccctgaattccagagggaagaaagaagaacagtgaagaagtagaactggtttctgtatggggagaggaaagtcttagggacagctgcaggcggggtctcaggctgctccttggcaccagctacacagtagtgagctttcccagctttaccgatgaggaagaagttcaaatagatagacttcagcattttaattattttcctataaatgtatttatgtgtagtatgctagcaccagccagtaagctgtgccacacatatgaatgggaaagcgaggcagttgtgctcgtgtgagtttctgcaggcttgtgggtaattaccttgtgtgcacgcctgcacgtgcagaatagtcactttctgctggtcagtttctttatccacccatggtgccccagccccaggcaggtgtggagaccagcatttcagaggacgcgctgtccacagcctcccgggtctgagtggatcattgggcaggggtggagacagtgcgctgccctctgagctggaagcctgtgcttcagggagtcataatgggcctgtgctaagtgggtgatgcagtggacatcccagggcgactagaggtggcagtatcgcgaatttgcaggtttattgaacaagaggtaacatcggagaggatcttgccttcggattcagcaagtatgaaggcagaagagcatggagagcaaggccccacagcctgcttagtgagttggaaggcccagcaagaacctgtttctgcagcagccaccagctcccatcaccccttgaccctccagctcatgctggagaagagggaattttggctgtttaaagaacacagttgtgaatctcagaatgtgcctgaaaggaatactgacagataaggccggaaacaaaactgatggcttgaaaaacatttttatggaatgtatttactatcattttgttttactatagaggtagatgggactcttaacttttgggtacatggaaacatgctgaaaactgaacacaatcctgatcatcactcctgcctggctgtctcctgggaggctgccgggtgccacggagctgggacacagcagagcccgctaggtgttgcagggccctggaggccaaggccaccctgtgtggggtccctgttggcagccaggtccctacacaaacaagtaatcctgtttggcctcctaggttttgcatatgacctgcagcctaatttggggtgtaggggaagctctgctggcccctgctcctttgtatgttgggtgactttaatggctggccacatacccctttctcccagctactcattcactgacttgggtaagttctaagacagttcgcacttagaaaagaatgtgacacatcaacattaacttttcctgaaaagaagagtttgcctaacatggtcctaaagaagcttggaatttataagactttcctttataagatatagtgggggtttttttgggtggaggggggttgttttttgttttttgttttcaagacagagtctcgctctgttgtccaggctggagtgtagtggcatgatctcggctcactgcaacctctgcctcccaggttcatgccattctcctgcctcagcctcccgagtagctgggactacaggtgtctgccgccacgcctggctaatttttttgtatttttagtagagacggggtttcaccatgttggtcaggatggtctcgatttcctgacctcgtgatccgcctgtctcggcctcccaaagtgctgggattacaggcgtgagccaccacgcctggcctataagatacggtaaaaaaaaaaaactgtgacccctttgtcactaagggagaaagaaattaagtattgtcaaagttctataaagaatggaaatgtatgatattatacttcaaaggaatttgatgttgaaattttaaagaaaatttgtcatgttgatgagaagcttcactttcctgggaacttcattcgttttagggcatgagataaaagtcctggctaggggagccataggtctgttgtacaaggaatttgctttctaaacaagttgtaacttgccctaaggtccctgttggagcactaagaggtgacacaggccagagacaacgtttcgtttccccttccctgcaagctgggatcagccctgtgttttctcctttcagctgaagtgagcgaaggttctcagtgctggcaaaagagcccactttctaaaaggacttgggaagaaagctgctgggaacttgcttattaaaaagttccttagaattaaggtatctacccactgttttcgcacctttcaccttcctgggctttcctgccctccagcattcttctctagagaggttcctagcccgctcagcgcgagcgtctccagtaggtaatagcagctgaacgtgggttttccacggacttcaggcttggaggtgccatatacaagcacacttcttccttcccctggcttctccatgccaccacccactttaaagatgtaaactcagtagatttttcatccagtgaacggtcatcttcacatcgaaaggtgaaggccaccactgttctcaatgccaagcaacagaacgttctgagatggccgttcttccttgcacagcagctacggcaggttgttctgcagccaccccttagagggggctcttcgttttacctttgtacagttcttgtgtttacacatttgggccaaacagctttcagcaagggcatgtgtccacagctgatgggcagttaagaaccagcctgagctgaaggctagtaataccgtgctgtaggctctttaaaaggaaagcctggcataaacccagcatggaaaggaacattatcagttatctcaaattttgtctgccagggacaagaccctgttcattcttttgcccttttcagaactgtgagcttcaagtattcttgcttctctgtaaagggaagacatctcccttctctgaaatccttcaacaaaagaaaaggctcttggcagggtaggggagtcagtagctcaacactagatcatccctagagatggggcaagtttctgtctgaacacgtcttgggtccgagtccttaggtgttcggatgcagtactttgtgaatacttaagctactgcatgcttggtgtagcttgcaatttctctgtatttaaaagcagctgtgtttattttcttcaaaataacctgtatattatttagagcaagcaatgtaaatattactgagaagttactgcagggatttttgtgacagagtttgtatgggtttttaaaaaaatcttagacacccctttttaagatggggagaacagggttgactgcaccgttgaagcccgcccagcattataaggaaatgtttttaatgactgctgcatctttgtaaaacgtttggtcatctaacagatggttttaaagtgtacaatatccaaaataacgatagccctgtatccatacattgtttcattgaaagaattctctattgcctcttcttggtagagccagagtccttaaggaaaatcaggaaaattaagaaaatgatggtgccatcttgaccagacttctgcacagtaatttaacgctatcctagggagacttggttgaaggcacagttctgggatcagggtctaaatgtgcagtttctgagaaccttcaagaccactcactgggcagggctctgtggagcactggagctgtttggattccccagccctttggtcatatcctggaattccgtggaggctgcagaacttagatgcagctgttttttacagcacctatttttgtcagattggtaaggaaacactgagtcacagaatacttaagaattggagactccagtaatgtaggatggcctgagaggacgtccaagtcccaaggggtggacacggcatgttcctcgggcacagcctcagtgggggccttccccaggcgcagctcggccacctgaggaaagggtgtttcggaggcgcagccacacacacagcgctggcagcctcacggtcacgcccatcactccctgccccccactgcccttgagaagttagtggtgtcacatccttagttttatagacagctaggaatagattgtgaagaacactcagttcactactgtgttacatttatatcacaagcttcaattaaaatggattttaaaggattttaggatttacctttagtattaacaacgtatctactgacatactgttaggattcaaaaccagttaagtataagaattacttcatgtggttttcctagggtacaatttataaaaggtagaaagcatccaagtggctcctcaacaattacaattcttaatgatttttctcacagctgtgcccttctgtcagggtcagtgtcaaaattcgttatcaaaggcaaaacctactgtgccaagctggggcgctatatgtgaacggagtggaaatgcttcagtcacctctgccgcagcttgtgattccagcagttctcacaaacgttctgtcacatgatgaaaagaagcagcttgtataattccaactggtgtttcatttctgttctaatgctaagtggtaacgcttaacaaacagactaaaagctgtgtgcagaagaaagggctgaatgagtaccgcctccctaggttccagcacagcgctcgggtctaagaagtagagccccggggtagggtgggccatccactgtcaggccagtgtctcaagaaagcctgaccagctgagctgctgctttttttttgggggggggggggggaggggcgtcttgaggctttttttttttttacaaagttagtttgtgatcaacgattcactacaattgaagtgttactttgtcagaatatttattcctttgtgtgacatgctagattccctggatgtagctgatcatttttattttgtaaatattacctaactttacataaactatatcataataaactatttttgcatcaccctttgcatgctgtgtaatgagattttgtttagttgagagacatctgcaaaataagcacgcaggtcaaaaggcaaactgaacagtagcctccagctctagagtgggttgatttcagtttcattacctccttttttttgagacagtctcactctgttgcccaggctggagtgcagtggcaggatctcggctcactgcaacctctgcccccggggttcaagtgattctcctgcctcagcctcccaagtagctgggactacaggggcacgccaccacgcccaactaattttttgtatttttaatagagacggggtttcaccgtgttagccaggatgctctccatctcatgatccgcccgccttggcttcttaaagtgctgggattacaggtgtgagccaccgtgcccggcctttattttattttatttattttttttggagcagggtctcactctgtcacccaggttagagtgcaatggcatgatcttggttcactgcagcctctgcctcctaggctcaagagattctcccacctcagcctcccaactagctgggactacaggcatgcaccaccacacccaattaattttgcattttttgtagagacggggtttccctgtgtggccaaggctggtgtcgaactcctggactcaagcagtcctcccacctttgcctcccaaattgctgagattacaggcatgaacacagtgccagggcctgattacctccttttgaattacagtggattttttttttttttcttttttgagacagagtcttgctctgttgcccgggctggagtgcagtagcgcgatctcagctcactacaacctccgtctcccaagttcaagcgattctcgcgcctcagcctcccaagtagctgggattacaggcatgcaccaccacacctggcttgtgtgtgtgtgtgtgtgtgtgtgtgtttagtagagatggggtttcaccatgttgcccaggctggtctcgaactcctgacctcaggtgatcacctgccttggcctcccaaagtgctgggattacaggtgtgaaccactgtgcctggccagttttcagcattttagaattacggtagttcacataaaaatttggattttacctgttcacacacaagccattgtaagaaatactttacatgcagaatctaattaaggtacactgccccagttaaagaagccttcaggggctaaagggacaacgagaagtgctaatggtggtgatgcttttattaatcaaggtcttgtaattccccatccctgtccctcttattaatagatttatttacaataaaattttaccttttgcttaaaaaagaaactgcattttacatcatgacccaatatacacacacgccaacaacctgaaatttaacaaaataatgcacccttactatatatactttgatgatttcgttcacttttaaaaattctgattgtgacccactaaataaattttaaataacaaacaactgggatttttaggttgggcgcagtggctcatgcctgtaatcccagcactttgggaggctgaggcaggtggatcacttcaagacaggagttcaagaccagcctggccaacatggggaaaccctgtctctactaaaaatacaaaaattagccaggcatggtggtgtgcgcctacctgtaatcccagctactcaggaggctgaggcacaagaattgcttgaacccaggaggtgggggttactgtgagcctagatcgtgccactgcactgccaacctgggcaacagagcaagaccctgtctcaaaaaagaaaaactgggttttttaaacaatatattcacaacctttagaatgaaatgggtgaaatttgtgggaatctaaacttttatccagataacattgaaaaaaagttgattctaccaataaatcaatttaagaggccaggtatggtggcttacgcctgtaatcccaccactttgggaggccgaggcaggtggatcacttgaggtcaggagttcaagaccagcctgaccaacatggtgaaaccccatctctactaaaaatacaaaaattagctgggcatggcggtacacacttgtaatcccagctactggggaggctgaggtgagagaatcactcgagcatggggggcagaggttgcagtgactgagatcgcgccactgcattctagcctggactacagagtgagactctgtctcaaaaaaacaaaacaaaaagtcaagaaatgtataaaacatagccaaaaaaagttaagtacaggcataaaaagatacacattttcagtctgctattccagttgtctaatttttttttttttttttttttttttgagatggagtctcactgtgtcacccaggcaggagtgcagtggcgggatctcagctcactgcagcctccaccaccacccaccccccgggttcaagtgattctcccatctcagcctcctgagtagctggggctgcaggagcacactgccatacctggctaatttttttgtatttttagtagagatggggtttcaccatgttggtcaagctggtctcaaactcctgatctcaagtgatccacctgcctcaccctcccaaagtgctgagattacatgcatgcaccaccgctcctggcctcctatggttttaacatacgctatttttgtaaagctatgtaaatgcaatttttaaaatcagttggcatttgaaaatccaacactgtttcataacagcctggcgacagagcgagaatctgtctcaaaaaaaagaaaaaaaaaaaaaggccgggcgcagtggctcacacctgtaatcttagcactttgggaggctgaggcaggcagatcacaaggtcaggagttcgagaccagcctggccaatatggggaaaccctgtctctactaaaaatacaaaaactagccaggcgtggtggcatatgcctgtagtcccagctacttgggaggctgaggcacaagaatcgcttgatcccagtaggcagaggttccagtgaaccaagattgcatcagtgcactccagcctgggctatagagctagactctgtctcaaaaaaacaaacaaacagtgtggtcttggcataaagagagatattgataaatcagtgaaacagaattgcgagttcagaaaaagcgttcttacatttacagtcaattgattttcaacaataatgcccagaccattcagtgaggaaacaataaccttttcaacaaatggtactgggacaactagacatccacatgcaaaagaaaatgaagttgggcctcctaccttgcaccatacacaaaaattaactcaaaacggatcacagacctaagtatgagtgataggaatataatatacaagaatggccgggtgcagtggctcacgcctgtaatcccaacattttgggaagccgaggcaggcagattacttgaggtcaggagttcgaaaccaagcctagcaaaaccccatccgtactaaaaatacaaacattagctgggcgtgatggtgggcgcctctagtcccagcaacttgggaggctgaggcaggagaatcgcttgaacctggaaggcggaggttgcagtgagttgagattgcaccactgcactccagcctgggcaatagagtgagactgtctcaaaaagaaaaaaattatatatatgacagaaaaaaacataggagcaaatctttgtgaccttgggttgggcaatggtttcttagctatgacaccaaagcacaagcaacaactgtaaaaatattaatagattataccaaaatcaaaagcttacatgctgcaaacaattccatcaacacctattacccaaagaagggaaacatttgcaaatgactttttcttttctttgagatagagtctcgctctgttgcccaggcgggagtgcagcctcaatttcccaggctcaagcgatcctcccacctcagcctcctgagtagctcagactacaggagtgtgccactatgcccagctaatcttatttttattttttttattttttatttttggtagagacaagatcttgctatgttgtccaagctagtctcgaactcctgaggtcaagcattcctcctgcctcgacctcctaaagtgttgggattacaggcgttggccactgtccccagcttgcaaattatgtatctgttaagggattcttatatccagaacatatacaaagaactcttaaaactcaacaataaaaagacaacccaaaaaaatgggcaaaggatttgaatagacatttcttcaaagatgacatacaaatggccaataagctcatgaaaagacattcatcatcttaagtcattagaaatgcaagtcaaaaccacaatgagacaccatacccactagaagggctatgatcagaaagttagatcatgccatatgttggcaaggatgtggaggaaaaggaaccctcattcactgctggtgggaatataaaatgatacttccattttggaaaaagtctagcagtttctcaaatggttaaatagtgttatatgacccaataatttcactcctaggtgtatactaaagaaatgaaaacatgtctgtgcaaacacttgtacacaaatgtttatagcagcattattcataacagccaaaagatagaaataacccaaattcccaccaacgaatgaatgggcaaacaaaatttgttatccatacaatggaatgttattcagccaaactaagaaatgaggtgctgaaacatgctgcagcacagattcccttgaagcatgacgcgaggtgaagatggcagagacaaaaggctgcagagaggattccatttctatgaaatgcccagagtaggcaaatctgtgagacaaagtagactagtgattgccaggagctggagggtagtacggagtggggagtgactactactggaacagtgtttctttttggggtgatggttacacaactttgttaatatactaaaacccactactgaatctcatgcttttaatgtgcagattttatggtatgtgaatcttgatcaagtgtgtttttaaaaactgggttggatcctggcagctcccatcggtgctgatcgcagccagcagcccgaggcctttagtgacgcctttcttcagcatctgcagacagcgaaaagcagagctgcaggttgaaggctcagagtaatggatggagccctaaaatgagtaagaataggtgcaggcagggcctgagtggtcactagaaaagagaaagcagagttggtgccatcacatacatccacctcatgccttattctgaaatttgagtgtgagaatacatgtcgacacataagccagtcatgattttaaaggcgtcggctgtggtcttgaaaagagtcatgtggaaacccatcatcaccttaagatttttttttttttttttttttttttttgagacgaagtctcgctctgtcgcccaggctggagtgtagtggcaccatctcggctcactgcaagctccgcctcccgggttcatgccattcttctgcctcagcctcccgagtagctgggactacaggcacccgccaccatgcccggctaattttttgtatttttagtagagacggggtttcaccatgttagccaggatggtctcgatctcctgacctcgtgatctgcccgccttggcctcccaaagtgctgggattacaggcatgagccaccgtgcccagccaccttaagattttgagtgtaaggatcttcatgatgaaatttctgaaaatggtccattctcagcttcaatttctgagactggagaaggatcctctagtagccacactgtagcagctgccctgagtcagcacctccacttggacccaaagtaggatgtctctcaggcatgtcactcccagtgacaccagatgggatccacccagggctgcctctgctgctcattgttaatgcctctaaagtcatctccatggttctttgggcttcatctttaaaggattcaagtgactgagactatcccagaaaactatgcagctagtgaaactagagtacaactaagaacattttcagacctccagtgtggatgacctgggcataatctcacaaactgatgggactgcaaggattgtaaactgaaattgacatgaatatactctgttggatcagactaaaaaaaaaaaattgggcccggcacagtggctcacactggtaatcccagcactttgggaggccgaggtgggcagattatgacattaggagttcgagaccagcctggccaacatagtgaaaacccgtctctactaaaaatacaaaaattagccgggcgtagttgtgggcgcctgtaatcccagctactcaggaggctgaggcaggataatcacttgaacccgagaggcggaggttgccgtgagctgagatcgcgccattgcactccagcctgggcgacagagagagactctgtctcaaaaaaaaaaaaaaaaattgtgggttgctttaaaaacctatagaactggctgagcgtggtggctcatgcctgtaatcccagcactttgggaggccgaggcaggtggatcacctgaggtcgggagttcaagacaagcctggccaacgtggcaaaaccccgtctctaccaagaaaaaaaaaaaaaaaattagctggacttggtggtggcacacgcctgtaatcccagctactcaggaggctgaggcaggagaatcgcttgaacccgggaggcggaggttgcagtgagccaagattgcaccattacactccagcctgggtgacaagagcgaaaactccgtctcaaaagaaaacaaaaaccctatagaaccaacatagtgctttaaaatatggcatcattgcattggttcattccaacaacctaggaatattcaacagtgtgggcagactgttaagggcatatggtactatcagaattttttgtttgttttgagacagagtcaagctctgtcacccaggctggagtgcagtggtgtgagcttggctcactgcagcccccacctcccgggttcaagcaattctcctttttcagcctcccgagtagctgggattacaggtacacaccaccacacccagctaatttttgtatttttagtagagacggagttttgccatgttgcccagaccgatcttttttctttttttgagacggagtctcgctctgtgtctcccaggcgatctcggctcactgcaagctgggcctcccgggttcacaccattctgcctcagcctcccgagcagctgggactataggcgcccgacaccacgcccggctaatttttgtatttttagtagagatggggtttcaccgttttcaagctgtatcactgcccgcatagttaacaacattgaatccaaaccactaagctgatgaaagctcatcccaggagacgagggcaattagaggggaatcttcctagagcctcttttgtgactgctgagcctacttggcaaatttattacttcttttaaagtttctctctgagaggagccaagacaatcttgtaggcaaaaagaggcttcaggtgacacacacactacacaaccccctccccagccctcatcttcagcgagcccctgccttctagcatcactcgcctcaggtgttggagcagaggccggcgtgcagttctagggtctcctgggcatgcctgcctgttactggcacagcagtctttacgtgtgggccaaggatcttctatacttttaataacgtcttccaagatcgggtgtctgatgagcaggcacacccagcacagtttcaacaagcaatttatcccccagtgtgcaggctccttccttacaggctgagtactatggggttacaatcttcccagacattgcttattggttgttaggcgggggctttaggtattttttttttagggttgtcttgctgcattttgttacagcccacagtgcattgcaatcttagtctgcttaggggctcttcaagtatttgacttatgacctaagtagctaggccagctggtaggaagagacaaagcgagctattttgcaggccagtaaactttcattttaaacttttttggttcgggtgagggcaaccaaggaagggggaagggggcaggcggggaagccgataaggcatcggctagcctgaggggcctagtacaacccgtttcttccgtagtttgctgaccgaagccgattcaaggcactttgtcttaaaaatggaccaccgtataccttatttccttcacccaaataacagcttaaagttttactcctctttgagtctcctgttctttgaccaacagtttctaaatagctgtatactgcccccccccgcaaaattatatttaacaaagaggagcccctacttgaatgatttagcagcaagctaaggcaaagacacccagcgctcacattccagaataagaacatgtttattcagatgtgccagaagtccagggtcacgcggcttcgcatttaggagatgctttacaagctctcccattttcttttcagaacatacactgggggaattcacaaactaaaacaatttctggtgacttccaatctatatattatactttacagcttcaattgaatttttttaaaagttaacttccaagctggcttgcctaacactgtgagtcaaaagtaaccctaaaaaggaaaaacacacagcactgaagggtctctgggtggtaatgccagcgtgggctggggaggtgagactaagcacatggctagcagacctcaggatgggccctggggctcatcatacagaaatatgacaagatgatgaagtcacaacttcagatgtcatcggagctatctgtatatgacacacacattataaacaaataacctggaacatttcacagtgtacgacacctgttctacctgggaatgcaaaccctgagctgcaaataagaacacagacgtgggagacaccacggcctgaagctgctctcctcttccccgctctcctctcctccggtcccgtgatgggttacgctgagccagcaatgtgcacgcactaactccacaggtgttaaaggtaaggtcacttctaaacacacaacaaaattaccttaacattaggacattaaaagttaaaagcccggccgggcatggcggctcacacctgtaatcccagcactttgggaggcggaagtggtggatcacttgaggtcaggagtttgagaccagcctaaccaacatggtgaaaccctgtctctactaaaaataccaaaaaaaaaatcagccaggtgttgtggcaggcacctgtaatcccagctactcgggaggctgaggcaggacaatcgtttgaacccaggaggcagaggatgcagtgagccgaggttgtgccactgcactccagcctgggccacagagtgagactccatctcaaaaaagataaataaataaataaataaaataaaaaaagttaaaagcccaacatagaaacagctgctggccatcagtcctgacagaccacagcacttactacccaaggacaggctgctgaagagcttggcactggcgtgcatactggttttaaagagcaattatgcaaggaatcaagggaacagccagcctttggtggcaatgacgctcacggggttgccccgaaggctgcttttgccacccgcaccgcacactcacatcttcccttcctcctgacttccatttcctttccttactctgaggaccgagccctgacaggggcagactgtgagggacaaggagactgtaggccccaaccaaccccagtcgtgccacatggagagagggatgaaatctcagggagatgctgaaagggcccacatcagccaaagcaggagggacttttctagaatcagggaagggaatgggatcgacctggaagaggcactgtgccttttctgtgctgtagcagaagtttcgattccaaaccaagatacggaccacactcatgaaagcaccccgtggcaggtcgtgactgaagttattttggcaaaggagcaagaaaaaggtctggcccgaaataactgacccgaagtaacagaaatttccctttcctaaccttctttagttcaatttagtattctaatagacgagactttagtttaacgatttttttctagtgccgaggtctccctccctcagaacgcacagcagcccgcagggagggctcagccccattcttggttaggtttggctttcgctggaggtgccgcaagttctgtgccatgaaagcaatctccctccagctctggagacaggtggggcacagcttccgtgacttttctttggtgggaaaaaggtatactttgtagggttaaactgttcccagatgcgctcaaattcttccagaaaaagccgcacgtactcgtcgtcctccgtgatgagaacattctccctgttgttctggatggcttgcgtggtccagttgagcgagccagtgatgagcaccctcttgtccacgatggcaaacttgtgatgcatgtagcctgggtcttgatcgtgccggacctggatccctgcagaaaggacaaggtgatttcattccatgcaggagtcccgcccccagtgtggactgttcctgggggctactggctttactatatgtttccagtttggtgggccaggaaagcccgccatgctttcacagagtggtggcggctaagctcccaggagggacgctgagaaccacagaggggacatcacacacagggccagagcgtcacacacaggctatgggggactgggcaggccgtggtctgggtgaggccacacctccgagtctatgccagccagtatgtcccttcggggttactgcttgctgccaaggctgtcactaacccagtcagaggtgaccagggcaaagacagcgtgtgagccttcaggttctgactcttccacagctaaggctgagagcgtgcccactctgcccagagaggccccggcgtctgagagcagagcccaatttgctggcacaacctcggccaccaaggcaggaagggccctaactaacaacgcacaaatgaattctcctcttccgcacccccctgcttccttcaccaaagaaccaggcatcccggcctctgctcttcccagctttcaaactcctcttgggaagggcctgtgtctgtctcccctggaataacactgcctcactcacgacctgcttaaggaatgaggccgtcagaaatggggcttaaaagaagttttaaacaggctgccatggaacacagttgccagattttccgaatcaaaatacagaacatccaagttaaatggaatttcagataaagagtaatctttgaagggaagtgtgtcccatggagtactgggaacataccctaaaaatcactccctgtgcatggaactcatatttaattgtgccccctaaattgggcctggcaggatgaagacgtggtggcttccttacctcgaggagccagcccttcttctcacactctggccactcctctggcacgtcctgtcggcacagccctccaaacacattcctccacacggtgggcaatgtaaaaccccaccatcgcccacacctcctgcctccgctgggatccactgcccacctccccgtcccctccccgcggcctgccacctctggccacaggggacttcctgcccttcctcaaaaggaagtcagtctgtgacccagggcgactgtgctgctgccccttccagccgcatgcctctccctccgaacagtccactggtgtcagcaaggtccctgccctgagtgtcactgcccctgggcagctgacctggcccacgccacttcctcccacaccactgcctccttaccctgctttatgaagttttcttggcccttctcagtgccctaaatgaaatattcatgacttagttggcatctccgtggcaacctggccttgtgcccttgtgccctaggatgttccagctcctcacaaatactggcacagaggggacattccttgaacagtgaatgccactggacagcctcgaagtcagcgaggatgctgggaggccatcccagaggggatccgatgggaccttggtctaggggcccttgaagggtcttcaccaacctcagcttctacgactgtaaaagcaactcaaacagaactgtactgtgcatgcctggaggtccccaaacctcccgttaaaatgaccaacacatgggaggacagctcttgtggctgccccaaagagaaggagacatcctcaatatgaaaaccacgtgccccactctgctcccacatggcgtgcaacatgccccacaccacccagagcagggagggaccctggctgactctggagaggctgctctgaggcccaagtcaacaagaggctatggctgtgcagaaggaacagcgcggcggtgaccactgcccagcctggacaattcccagggctccacacatctctcggtcactgcgaccaccagtattatcagatccaaccgttgcacgtgcaggcgtgactttctgggtgcctgagtgatggagacagagacaggcccaagagtctgtgagtgcagatacacaaaaggcaacagcaggctgggccgccgaactgggccaggatggactgagaatcctcaggtgggacaaggatcccaattattcacatttcctggtcccttctgtccccaccccatgagagaggcgcccccgccagaaatatgtgttcccctccttttgcagctgggaaaacaaccgaatgtcctggcgctgctttctagaacatgttcaggtctcccagagcccagtggcctgagattcactgggcagcaggtggccgcctctccccagagcccttcagtctggaagtccaagcacaaccctggcgtccagctcccctgccaccaggatccaggttaccagaggccgtccggggatctccggcagcgtaggagggcgggcccgggctgcagcagtcacgaaaactccgccggcggcgcccgaggagttgctaggggaatctgctccgcctctaacccggcacacgcaggcccacctgcttccagcatgccgggacagttcactgagagaaccgcccccaccgcggaggcaccgagggtccggctcgcttatgcccacgcagccggctagaccttctgtgggggctctgctttctccgcgttacaccaccccgaccccacaaggccacgaggaaagtaaatgaggcctcagcccgtccccagaccccctcccctaagtgtccacctttgcgcctaggaccccgcgtgggccaagccggccttctccgcttggaccccgccgggcctacctgccttgcgcagcagaccgatttgcgagccgttgagggccatgtagtcgcagtcggtgacgacccgcactcgcaccccacgctggtgcagcaactgcacggcgcggcccagctgcgggctggagaaggcgaacaggcagagatccaggctggcgcgggcggccagcagggcacgcagcaggcggcttagcgcgctctcgccgtggggcaggccgcacgggcagccctcggggagctcggccagctccgcgcccggagcccgcagcagggcctcggtacaggtcacctgagacgggaagaacagcgcctcgcgccgcggccgccgccgcctggaccgcagccagcgcagcacccaaggcagcgcctccagagtcagagccaggcccacagccgccgcggccgccacctgccaactcaaccgtcccatgccgccgctaatccgggacccacagccacgccgccgcagcggagtctgcgcgcccccagccctagaccgccaggccacgcccccgtcacgcgccgccagcggccatgtgccaggccacgcccagccccccatggccacgcgccaggccacgccctatcacgtcctgccaattgccacgcaccaggccacgcccccgtcacgcagcgccaacggccacgtgccaggccacgtgccaggccacgcccagcacccatggccacacgccaggccacgcccccgtcacgccccaccaacggccacgtgcaaggtcacgccctcagcccccgagggccacgcgctaggccgcgccatgcccccacaactgtcacgcaccaagctgaacccacgcctcccatcagcccgcccccaaccctcaacaggtgaccacgcctccctccacgcgccaggccacgccccctgccacagacaccctccaccccccaacgccaggctgtgccccccattttccttccagccaggcgctcggccacgccctccaggttccacctcccaccacgtgccaagccacgtccccaagcccgcgccaccaggcagcacctgcacacccgcgggccacgggccctagcacacccgtcacctgcccaggccagagaccgctctccgcgctagaagccacagcaaccccggctttcctcgcatggagcacagcagagctgctctggaaatgtggggtcacaccttcactgtcttctcgggagcagctaggctgggctggggaatgacctgggaacacagataatcagggaatcaacacagctggaggcagcattggaacccagcatactggaggcggtgtcggcccagaggttttttcctagcccaagaggttttttccagccggcgttgttggaaggcctgccctgctttaagcataaacagaggaagagactaaggcagccgagggcactgggccgggggcatagggaaacggggcaatgtggtggtctgggctggatcctggaaccgaaagaagacattcacggaaaaactggtgagagccaaataaagtctggagcttaatcgcattgtaccaatgtcagtttcttagctttgacaaatgtatgaaaggaatgtaaaaggttaacaaaggaagctgcgtgggggtaaatggatctctctgttctatattcgaaacttttctgtaaagcaaattattctaaattaaaagtttattaaaatattaaacttgcaccttccatatgatccagctatcccactcctaggagaaagggcgggatccattaacacaagcacgtgtcctggcaggcgtatgtgcctagaacaacccaaaaaggcgtcagcaggtaaacaggtaaataagcttttgtatatctgtacaagggaatgctatttagcaataaaatagaatgaagtggcctggcacggtggttcatgcctgttatcccagaactttgggaggctgaggcaggaggacagcttgagttcgggaattcgaaaccagcttggccaacatggtgaaacactgtctctaccaaaaaatacaaaaattagctgagtgcgctgacgtgcctgtgatcccagctactcgggaggctgaggtgggagaatcgcttgagctctggagactaaggttgcagtgagccaagatcatgccattgcactccagcctgggtgacacagcaagaccctatcccccccccaccaaaaaaaaaaaaaaacagtactcacatgtgctacgacgtggatgaatttcattaatattgagtgggaaaagccagacaaaaagagtacatactgtatgattccatttacataaaattctagaaaatgcaaactagattgagggaaagcagaccagtgtagcctggaggccaacaaagccacaaggaagtggagtgatggatgtgtgcttatcgggttgactgtggtggtttcacaggtatatacatatgtcaaattgtatggtgtaaataactaaaaatgtatgtcagtgattatgtcaataaaattcttttttttttttttaagacggagcctcgttctttcgcccaggctggtgtgcagtggtgcgatctcggctcactgcaacctctgcctccggggttcaagtgagtctctgcgtcagcctcccgagcagctgggattacaggcgcccaccaccacacccggctaatttttgtatttttagtagagatggggtttcaccatcttggccgtgctggtctcgaactcctgacctcgtgatccacctgcctcggcctcccaaagtgctgggattacaggcgtgagccaccgcacccggccttcttttttttttttttgagatgaagtctcgctctgtcgcccagtctggagtgcagtggcacgatctcggctcactgcaaccttcacctcctgggttcaagcaattctcctgcctcagcctcccaagtagctgggactacaaatgcacaccaccacatcggctaaatttttgtttttgtatttttagtagagacggggtttcatcgtgttagctaggatggtctcgatcgcctgacctcgtgatcagcctgcctcggcctcccaaagtgctggaattacaggtgtgagccaccgtgcctggcgaataaaattcttaacaaagaaaaagaacacttgagtttagtgctggctcccaggcttcctagctgcatggtctagggcaaattgattcatctcttctgagcttcactttcctcatctaaaacgataatgagaggagggacttggagttgtggaggtataaagaaggactcaaatccctccagagagggataaacaaaaataaaactgggggaaaacagttttcaaaaacagccacttcagggctggaaatctaccaaaggcagacaacaaaatgagaagctttatttgatttttatttattttttgtcttccagtttctatttttaactttgtcggtatatagtaggtatatatatttatcgggtacatgagatattttggtacagacatgcaatttgtaataatcacatcagggtaaacaggatatccatcaccttaagcatttatcctcttttgtgttacaacatttagttattagtttatttatttatttatttatttgagacggagtcttgctctgttgcccaggctggagtgcagtggtgcgatctcagctcactttgcaagctctgcctcccaggttcacgccattctcctgcctcagcctcccaagtagctgggactacaggtgcccgccaccacgcccagctaatttttcgtatttttagtagagatggggtttcactatgttagccaggatggtctcgatctcctgacctcactatctgccctcctcggcctcccaaagtgctgggattacaggcgtgagccaccgtgcccggcctagttttttattcatttatttttcagatggagtcttgctctgtcagcagtgacgtgatcttggctcacggcaacctccgtctcccagattcaagcaattctcctgcctcagcctccagagtagctgggattacaggcacccaccaccacgcccggctaatttttgtatgtttagtggagacggggtttcaccatgttggccaggctggtctcgaacacctcacatcaggtgatccgcccaccttggcctcccaaagtgctgggattacaggtgtgagccaccgtgcctggccgtttgtgtttattttttattttttgagacagagtctcgctttgctgcccagacaggagtgccatggggccatctcagctcactgcaacctccacctccctggttcaagcgattctcctgcctcagcctcctgagcagctgggattacaggtgcctgacaccacgcctagctaatttttgtacttttagtagagatgggagttcaccatgttggccaggctggtctcgaacacctgacctcaggtgatccgcccaccttggcctcccaaagtgctgggattacaggtgtgagccacagtgcctggctataataaccattttaatatgtgtgtgtatgtcattaacatcatgtcgtataccttaaatatatacaatttattttttaaaagcttatacaaactatattatcagataaggggttaatttccacaatatataagagctcaagtgattctcctgcctcagcctcctgagtagctgggactacaggcgtacaccaccagcctggctaatttttttttttgtatttttagtagagacggggtttcaccatgttggccaggctggtatcaaactcctgggctcaggtgatcctcctgcctcggcctcccaaagtgctgggattacaggcgtgagccaccatgcccggccctgagtgtaagtatcttgaatgtaaaatcaggaaacccttgactgccttcaaacacatggggaaggttcaagatctggaacttgttttctgtctcttccattttgtgaaaagctacaaaatcaggaacccctattccctcacaaggacagcagagtctggcctggtcttgggctggcataggttcagctcagcctcctgctcttctgcactcatgaccaataggaaaaatcttcaagaactgcatgcctgtggggagaaaaagcccacagctgcctagaaacaccagttggcagctgggtgcggtggctcacccctctaattccagcactttaggaggccgaggcgggcggatcacgaggtcaggagttcgagaccagtctggccaacatgatgaaaccccatctctactaaaaatacaaaaattagccgggtgtggtggcatgtacctgtaatcccagttactcgggaggctgaggctgaattgcttgaaccagggagtcggagcttgcagtgagccgagatcacaccactgcactacagcctggcaacggagcaagactctgtctcaaaaaacaaaaacaaaaacaaaaccaccagtcggcatagggccttgcctgccccctcgccagcaagctctgttagacatgggaaatccaggtcacacatgcccctgaagtgaatgcagagctaacttacactgggctcctacttgccaagtggattcagccactagactggcagacaactggcaaaaactgagcatagaaccacgttcccaggaatgccatgcacgagagaaagacaggaatctgtacccgaagccggggaggacagtgggtggtcatctctcccttgacccacattggccagggggtcccctcccactcgaggtagatgactaaaccgtgaacctgctgttttagggattgccacggtcacccagggtgattccagccatcttcctctcagatggacatgtcttttaaatatcatcattattaagggatgagccatttctaatgctgaacaaaatgaaaagcacatgggcataggtactcaacagatgtccttgggataaatgagtgtttgcttctctccaacaccaactccaacgactaacttggagaagattgtctacgatcattatagcagcttaactgtgcgaattggccactcactggtattttgttttgttttttgagatggagtctcactctgttgcccaggctggagtgcagtggtgtgatcttggctcactgcaacctctgcctcccgggttcaagtgattctcctgcctcagcttcctgagtagctgggactacaggcatctgtcaccatgcctggctaattttttatatttttagtacagacagggtttcaccgtattagccaggatggtgtcgatctcctgacctcgtgatccgcctgcctcagcctcccaaagtgctgagattacaggcatgagccactgcgcccggctgactcactggtattttttaaccatagtatttcctgtgcctgagcgcaaataaatagtaggcatcaaaccaataaaaccatgtagtaacaatttacaaaaatacatctttattgtgttccaatgttgttgcattatacagatacctagttatataaacttggtcttcatgttaaatataaacacaaaaaaactagaaacaaatcagcaaaaccatcagaaaatccctctgagccatgaatccttattaaaaatgtatagtggggggtacctgtagctgtatgttgaagcaggaggactgcttgaactcaggagttcaagaccagcctggacgacatagcaagatgccatctctttaaaaaaaaaaaaaaaaaaaaaaaaaagggccaggcacagtggctcacgcttgtaatcccagcactttgggaggctgaggtgggtggatcacctgaggtcaggagtttgagaccagcccggccaacacggtgaaaccccgtctctactaaaaaatacaaaaattagctgggcatagtggcgggcacctgtagttccagctactctggaggctgaggcaggagaattgcttgaacccaggaggcagaggttgcagtgagccaagatcgtgccattgcactccagcctgggcaacaagagtgaaactccctctcaaaaaaaaaagtacagtgggatgatgaaattgtcttcaatcaccacactccgaaaatagttaactgtaaccaaacgtaaatgttgaaagcagcaataaagacaaaagcgatacagaataaaagcatggcggggctcaccatatccaggggattgggcaagtcagatgcttgccgacccctcagcaacctgtcttgtgcaaaaatgatcagggactccatcattaagccccaggttaccttcaccagcacctgcaggggaacaccccagaagacgagccccatggcttcagaacacacatttcagaggaccaaaagatgaggaagagatccacttcactccccaaagtctcttgcggagccctaactcaatcactcagtgaccaagagctggcaatgtactgaatattcacaactgcagcaaaaggtaccctcaaacataaggcccagaaactcttgctgaatttcaaagtagaaacgcttgaatgttaacctcgggagcagacatgttattgcgactgcatactgagtcggacctgtttctcctgcgggttttgagtctaagtccacaaggggcctgggaggcaagctgtcctcctagtcgtctctccaaggagtttgaacacagagagagcccatcatccctccgcctttcattgccatcttcagcgattccaacggctggagggagagtctgggaagcacacaggccccaaacctgacagggccgagcccagccctgatggtttcccttccttgctgggacacagctccttccagcagttgagaaactcaagggacagtccctctcacggggctggaggatcctgtggacagccatccctgtctttaggcaggtgtgtgtgacgggtcagttccgagactccgaggctgtggggctgcggaccgtggacatgaggtgtgacttgtaggtcttgctcaggccagtcatccagaacttcagcagcttgacattgtcctcctcggacgcacccaggatgctcagcagcttctgtgtgtcctctttgggtcgactgtccaccttggtgaacttaaaaagcaccttcactttgctgaagaaaaccaaaacaaaacactcagacaccacagcacaatccctcgagccctggtcacggggccaaccaggggtgacacggctttggcaccagcaggagctgtgcaggcagagctggaatccacacccttggggcagcaggcttggcccctgaactgctgaaaggagctgtgtcccagcaaggaagggaagctgtcggggctgggctcggccctctgtcgggtatgggtatggggcctgtgcgcttcccacaccctccctcaagctgttgtcaagacgccaagaagaaagaaaaaccttccttaaactcgtggaagacactggttgctcctaagcttcactgcatgattttaaatcaggacaatgtttgattaataaatttgacccaaaaaattaccaagaatcgaggcaggaggaaataaagtaaatttgcttacaaaaaaaaaaacccggggggccaggtgcagtggctcacgcctgtaatcccagcactttgggaggccaaggtgggcggatcacgaagtcaggagttcaagaccagcctggccaacatgctaaaaccctgtctctactaaaaatacaaatattagccaggcatggtggtgggtgcctgtaatcccagctactccagaggctgaggcagaagaatcgcttgaacccgggaggcggaggttgtggtgagccaagatcatgccattgcactccagcctgggcaacaagagccaaactctgactcaaaaaaaataaaaaataaaaataaaataaaataaaaagcggggtggggcatgggttactgggcttttaggttttgaagttaattgcacagcagatgacagagcttccattatgaaccctcctgtgagcttggagcccttgcccaagcctcagtcgctctccaaggcaggcgccacccccacctccccatgcaggagccggaggcagacatgatgaccgcctcccgaggccacctgagctttgcagtggcggacgtggagttggaaccccgcccccaacctcttctctcggctcctccctcagtggccacggcccagctcctcttttggaaacagctccaggttttctccagggtcgcaagcaaaggggcctcacccacactgttgcttacttcatccactcctccttgaggcagacgaggcactggtccaccacatccacagacaggttctggttggtcagagccgcttcaatcttattcaggatggtggggcccactggggagaagggcaggggcagagcaagggcaggcgttagcgcggggcgggggcatcttctcacaaaaaggacactctgcctgggggcacccacctcggtctgcagctacagggctcccactggtcaccacaaactcgtacttgctgagagactggtcatcctcacaccccacagggtggagggtggaacgtgcggctgcgtggacctccacgatgacagcaaactctgtaacaacacaaggcccgtggctcctcatctcccccatgctcctcacctcccctgcgctagcccaccgtgggccccactccgctcatcccaggtcagtggggaaggctgctggtgaaaagactggcccaaatcaatgctttggtatttaaaacctttcaggttattcgtgaatagttaagggttaacttttgcctcagttaaactaataatttattatattacaataatcacaaagtactttatatacatcaatttacctctggctaagcagccctatgagggtggtctcaccatgaccctattctacagatggggaaacaggcctggagacgttaaataacctgctcgtagtggtaagaatttgaagtctgtttgaaaccagagcctgtgtttccaatgctacccggaaaaaaggcactgcctcgcagggagtcaggacccagcctgggtgctgattgggggctcagggtagctccactcggaccatgagtcagcagctgctggtcaccgctgtgctgggggaagtcactgatgagcctggggggctgatccctggacatccccaaaccaaaagaccaggggtttgctgagccctgaccacaccagtgaaggccgggaagacctcgggcacatgaggtgaagaaaaaggctggaggagagcagaagtcaggacaggggaacagtagaagagtgaggagaggatggcagggcccacagaagcaggcagctcacacccagcattcagcaggcctccatctcataggcacccaatcaccaggacgaccaggatcctccggccagggacacatcctcccaccccacgatggtgacctgcagcccactgacgacagtccctgccagccaaccttcccatcaggtccactcacccaccgctacctgtgtgaagatagaacacggaggcccagagccatgggggaagctggccctgcaatgaggcctcctctccacaacccatgacagagatctggttccactttgggcctgaggcgtggggaacctcagcgcagggcatggccccacagcccgcgggggcacgcacctgaggagagcacgtggggggggatctgcacgtgcgggctgagccccaggaagttgcaccgataggcctcctcgtactggctgctgtatgggatgatgcggacgcagcccacgggaagcatggtctgaggaggacagcaggactcagaccaaggacacgaggaagccctcagccccggccatccatgctctactacccaaaccccacacgcctcctgcagcccggtccaagccctccctcctgccagaggagtccccagactctcagcccacagtgggggtgaggggggagggtcctccaccaccaggtccctaactcttgtctggaccgccagtcacacaccagcttgtaccgcccctcgctctgtggtgttaactcatattaatgtttgcctgcacagatgtttgtctcctaccgcatcccacaaagaagcttttaccaagactgtgtcatatgcatttttgttccctctcaggcctgggcagtcagcaggcacacgcatccttctgatgatttaaacatcatcagaccagacccgggtctccgtgcccactgcgcccccagtggagaccgtgtggtgcacagcggttctgtgctgggcagtcggtgcaccttggcatccccacctgacgccaggcaccaggccaatactgccctgcgccgcacacctaaggaaaagatgttctcacccgaagtacttcaaaagctgactggacgaggtccacgtctctgcttttccagatcacctggttccccatgagaacgtgccaggccagcatgcggaaagaaggggcacccaggacctaaacaagagagtgcagtgctttcagcgtgactagtagaaatggtttttctctcccttcccatgaagttatttgtgtgttcataaaactttgtagagcaaagacagggctcaggagaaagacacttatcttctcagggaggcgggtgcccggcccagggttaaaggggcagagagagaagttccaggtttgcacataaatgctagattccaaagctcttgctccaagatctttctcccagttttgtttttaaaaatttgaagcaaaaagatgttaactttgtgcaatattcaccttctctctacagacactttctgctgaaccatttgaaagcaagctgtagggccctcgacatggcagcacccaggagaataagggcatctccacagctgagaccatgactgcagccaggagtgcctggacggacgcatctgacatccagccgtgtgcacaagcccagggctgctgcctgcttgacggctgctgttctttggatccaggagatactacaggacccatcatggcttttagttgtcacgtccttattctttaacctagaacagcctctccccacaccccacctgttattaacttccatgacattgacaccttaggagagtccagcctgctgtctcacggcttctaagaagccaaacccagctttgaaacacaacataagagagaggccacaatactatgtctcaccaaaccccaacagcctcaaagtagtcccacctccagaggaattccagaccccttccaaccttcatcaacataagcaacggacaaggaaggtttcagccaaatgcaggattttgatggaatgggtgtttacatccagaagccccaaggacatctgccatgaaatcagtctcactccattttcaaaaacaaataactctcttctaatgaatcagtgctcattggaaaaattcatgcagaagaattttataagaaggcagcctgcccttgtaatccagcaacccacacccctctctcccggcatctgactcgatgtaactggagacaacactgttagattttgtcgtgtctggcaggcacacatgtacatacatcaccctgaacacacagtgcctgctttatttcttctaattaatcatattccatggtttggctactgtttactagtatggtttgatatgcaagttgttcctaattttttgtaagaatgaccatcactttctttttttttttttttttgagatggagtctcgctctgtcaccagtctggagtgcagtggtgccatcttggctcactgttaacctccacctcccaggttcaagcgattctcctgcctcagcctccaagtagctgggactacaggcacatgccaccatgcccagctaatttttgtattaatagagatggggtttcaccatgttggccaggctggtctcgaactcctgacctcgtgatccgctcccccttggcctcccaaagtgctgggattacaggtgagagccaccacgcccagccagaccatcacttacaatgggcagggtccaggctgcatccaaaccaattacagtgctgttcaatgcctttaggagcttcttagaggattagaggaccatgggatgccaactatctgggcttttctttgaagatacttaggtcatcactgaaaggggagcactgatcctatggctaatacccccaacgccctgtgccctcagccacccaccgaggaggctgtcagtcacttcctgcagggttttgaaggtggagggtccagaggcaaggcgtgtgggcagggacagcccatgactggctctcctcctgagctcctgatgcgctgtgcccctgccgcctacctgcctcatgtgccggagggacttgaagactggcagcttccggggctgccagctcccacagcctgagagagaggaggactctgccgggccctgggtcagctcccgcccttctgtactctctggcaacacaggggctttctcctcctcttcagcctcagagttgtcccagctttctgattcctcttctaaatctgcaagacagatgacaaggacagttacagatacaaacagtctcatcctgtgacttcagcccaagatacttcatgggctgagccggtcagtgtagattcctggctgcggccaggtcctatgctccctgctccctgttgctctgggagccctggggtgggagggagggctcagttgctgtctacttagcccggggtaccacacatctctcttagaagcacttatggaaagaccgtcagctgttctctgctggtgagaaaactcaaatcagtaagaaaaatgccaacagcgtgtctacggaacacacccagtcggccacagttctcgaggatctacacgttgtttcttttttttccacttttttttttttttttttttttgagacggagtctcactctgtcgcacaggctggagtgcagtggcgcaatctcggctcactgcaacctccgcctcctgggttcaagcgattcttctgccccagcctcccaagtagctgggactacaggcacctgccaccatgtccggctaactttttttggtatttttagtagagacggggtttcaccgttatctgccaggctggtctcaaactcctgacctcatgatcccccgacctcggcctcccggtccacttttgttttagcttgagggcgtacgtgtgcggctttgttacaagggtatgctgcgtggtgctaaagtttgggcttctatgaatcctgtcacccagacagtgaaccacaggaagtaatatgcccagatagtatccaatagaaagcatttcagcccttcctccccttcctccctccctccctccttctggagcccccagtgtctactattcccatcttttttatttgagacagtgtctcgctctgttgcccaggctggaatgcagtggcacgatcacggcttactgcagcctcaatcttctgggctcaagtgatcctcccaacgaagccttccaagtagtgggactacaggcatgcgccaccacgcccagctacttttcatattttttgtagagactggacctccctatgttgctcaggctggtctcaaactcctgagctcaagcaatccacctgtctcggtctcccaagagctgggattccaggcgtgcaccagtgcctgacttcgttctttatggctacatccaacatcatttcatttagtcctctcagctgttctgaggtcagcactattatctccatttcacagatgaagaaattagtatttgtcatttcaacgaaacttcatggagccctcacaaatgacaacatctccatttcacatcacgagacccaaagggaagggtgcacgtcagaagcaaatccaggatgcgaagccaggtctgtctgatgccaaagggcaagccctgagcccgaaaccccatactgcgcatgcccagcacacctgcgtttccagctctcacaaaggcttcgacagacctggctcttcgtgctaaaaagctcaccaagacactgcccttgccatctgcacctgcctagaaacatgattagcactataataaatggctccagggccagccaacctgcagggcatgggggtggattcccaggctttgtctttcctgaccaggttttgctcttgctgagactccattggcaaagcttatttgagggcacgcctgcacctgcctgcagaaacacctcgaaacagctctggctgtttggaaggctggtcatttgcaagcagaagcatgggaagcattattaatgacatgtggtgtggaacaatggtcgtaccacagacctgtagcaccaagatcaaatcatccctgatggaaagcttggccaagactggcccagtgcttccaggctggtgcacacagtgccacgatccccaaacacagggccccaagccccagatcaggaacctggggaagcccaggcacctgggaggtcagggaaccactgcccttcatggaaaacttgggacgaactgaaacagaacactttatttgtaaaggagcaaagaccgtcgaccaggccaagcacttggctatcacaaaatcgggacgagaagcctttaatcagccagttctctctacagacagcccacctgtgaattttccccacctagctggggaacagattctttcacatggcggtcaaggcaaacgagacaggaaatcacaacaatcacaacaatcacaccgagatcggagggtgagcttcccgaaggctcgttctgggctgattcagagccgcgtttccctccctcagcgattcctgccaggagagcagacagctggtaccgccccacggccatccgggccaaggccccggcaacagcacccctgcctcaccagcgagcttctccatctggaccaaggtatcctcggtcggagcaccttccaggagcttctcggtcagccggctgccacacgccttcaggagcctggagaacacagcaccagctatgagcgttctcgccaaaggaaaaagcaaacctgacgctcacccagcccctgatcctaccagtttaaagaaaaaatgggtataaaagaacaccagcagggcacaaccagccagatcccgcatgcaggcagttccacaagtcaacgaccaaggtccttcaatagatggatgggaggaacttggaggggaggggatgcaagggggagctgttctaaaccagagagacttggggcgctgctccgatgccaatgcagtcacttgtgagacaaaaggtaaactgcacaagggcttgcagcctggagaacactcaggagtctgtccgttttgtcggacatgatcacagtattgtgattatatttatggctggaatgatacgactcagatttgctttaaaaaaaaaaaaaaaggctgggcgcggtggctcacacctgtaatcccagcactctgggaggctgaggcaggtggatcacatgaggtcaggagtttgagaacagcctggccaacatggtgaaaccccgtctctaccaaaaataaaaaaattagctgggtgtggtgacaggcgcctgtaatcccagctacttgggaggctggggcaggagaatcacttgaacccaggaagaagtgagttccacatcaatatgttttcagcacactcaggggaagaggcctacagaacaaggactcccagcccagatctgtgctcactgacaagtgcccacaggccagtgctcctcacagaggcagcaagcaaacacggctaaggactgttctcccaaatccatggacaagccaaccaatgtatcgtgactgctctatcctaacagatatgccaaaagcagagacgcccgttaccaggcaaaggaggtgtgcaggcacgcccacaggttgtcatcacttgtcagcgatgtcagcgagcgggcggcgttgccgttcctctggtgtaggaatggcgtgaaggctgtgttcatcctctgagcacgctgtgggcatccaaactgctctgcctcaaacacctgaaatgcaaagggaagggatggcctctttaagccaaagctgccagcagctcggacccctactcgttcacagccaactccaggacctgactcctggaggatcagtcccactatactctctccatgcagagcacacaaagtgccaccagtccaatcattcccaacagcatagctctgccccggctacatcaggagctatccgagaacagaaatcggttgagcttctcctgtccccttcctaatgagtgacccaaggcacccagggggattctcgtgagtggccatctgcgctgctccccacctgtctccacctccccttctgggtgcactacttggctaaggcacacgtgactggctctggtcaatgagctgagacaaacaaggccctcagcaccatctgtgcttctggagggcagaaggagcaacattttttcctttctttttttttttgagatggagtctcactctgtcgcccaggctggagtgcaatggtgtgatctcggctcactacaacctctgcctcatgggttcaagcgtttctcctgcctcagcctcccaagtagctgggattacaggcatgcaccaccatgcccagctaattttgtatttctggaagagacggggtttctccatgttggtcaagctggtctcaaactcccgacctcaggtgatctgcccgccttggcctcccaaagtgctgggattacaggcgtgagccactgcgcccagcctaggggaagcattttcatatggctgccgctctgcctgccaggacgaccacagcaagcagagccccactctcctgcaatgcacacaccatgagtaagaaacaggccctatggcttgaaggtgctgagatccgaggctgttaccagagcacgacctggcctggcctggcctgagctgcatctccacagctggaggcctacattcggtggtgcaactcaatgggattaacagacatccctgagatgaaggccagaggaaacaaagacaccaggggtctgactgcagcaaagaaaccagagctgagcgagaaccaggacaacgggcacaagagagaccagcaaagcaggcgggatggcctgggaggctcctcacgacctccagctctgaagccaagagactacaattcacacagtgcactggctgtaagcagaggggaagacgccacgcggtctccaggcctcaacctcagcacagagcggctcatgcagtgcagggccccctgccgccccggcacctcatctctgaattcaccttgagcgccttgccctggagctcatcgatgattccccggaccttccccagcaggaagggccaggagttgatgaggtagatccggtccatcatgatggtgatgatgctgtaccagcgctggaagcccctggccaggctgtccttgatgaagaaggtgtggctgaacacaaagccgtgctgctcatctccgaagaagatggggccttcacggccagggcagacctggagggacaccggcgactcagacagccctttcctcgcttagtgacaccaaatcaaagcctcttcttcagacttttcagagtcagctggcacaaatcagccagcgttaataacggggagagtggcacagtgggggccatgagagccgaagactgtactcttctgctcctgtgatcaagcttccaacaacacttgtcattgtggactgcaagggccggtaacaaggcttattgcttttcttccaccttgagccataaataactcccatgcatatgtcacacctctcccagactcaaatgtaccagcttactcacctggagcatgcagaagaaccagcaggtcagagcagccactgcactctccctgcactgaaatccgcacattttattctttctttctttctttatttgagatggagtctcgctcttgtcacccaggctggaatgcagtggtgtgatcctggcccactgcaacctccgtctcctgggttcaagcaattctcctgcctcagcctcctgagtagctgggattgtaagagtgtgccaccacgcctggctaatttttttgtattttttttagagagggggtttcaccatgttggccaggctggtctcgaactcctgacctcaggtgatctgccggccttggcctcccaaagggctgggattacaggagtgggccaccatgcccagccccacgtactttattcttataagaggatttcagtccctcctcattacatacttactcttccttaacacacaattctaacagacatgccgagctgcctgctagcagaccagcggtaggaaattaaaaggagaggacagttgagggcaggcacacagccacactgaatgagaacagtaagggagcttggtgtgtcgaactgggtggacaccaatgacaaggaagtttagtaactgaacgacgaattctttgtaacaaagacctgagctcagagtcaagagcaacagcagcagcgacgtagtttaggaagaaatcatccacacctcagcaggctgagagcagcacgggatcatcactgagacttggaatgaggactgagataataaaaaaaggtgatgttgatgcaatgaaccacctaacctagaaatgcttcctatcttaggaatacatccatcaagaatagacacacatggctgggcatggcggctcacacctgtaatcctagtgctttgggaggatgagccagaggattgcttgagttcgagaccaacctgggcaacatactgagacctcatctctacaaaaaaattttaaaaaggtggggcacagtggctcccacctgtaatcccagcacttcgggaggccgaggcgggcaaatcacaaggtcaggagttcaagaccagctcggccaacatggtgaaatctcttctctactaaaaatacaaaaaattagccgggcatggtggcacacgcctgttgtcccagctactcaggatagctgagacagaagaatcacttaaacccagggtggaggttgcagtaagccgagattgcaccactgcactccagcctgggcaaccgagtgagactctgtcttaacaacaacaaaaaacaaaccccagttgagcatggtggcacacaccagtggtcccagccacctgggaggctaaggcgggaggatcgcttgagcccaggagtttgaggttgcagtgaaccatgacggcaccactgcactccagtctggacgacagagcgagaccctgacacaaaagaaggaaaaaagaaaacaataataataaagaaaggacaaataataaaagttcggtgcttaaagtgcaaaagctagcactcaatcagaaaatgctcagcaagtccaacatgactcctcccgcaattctggacaagggaggcgtcctgtaccctgtgctgtgctgatctgcgggtccgccctgagagaggaccagtgcctgcctccctgtgcaatgctggctccgagcccacccagagcacctgggagcatgtgggctcccacagagacaggctctgtggccacaaggctcacctcacagctcaggctccggacacaggcctggcggacaatgctgaagagctgggggtggctggggtgctggtggctgacgtatttaatggaggtctctttatcatggctgatatatcccgggtgccctgcagcaagtgaccggcagccctgtccatgaaaaggaaaagtaaatctgttagttgggaagcagggcgacaaactctcttaggtttatgcaaatctgagctcggaaaactcaagctatttttgtaaaaaaataattggcttccagatttatacttatctgaagatttaaatgtttcctaaagaggaaaacagaacacagagatcgcagagattgccagaggttgttcctaacaggtatttgctgagcacttacgaagtaggtaacatgaaaagggccctgcatgctccatctcattcaatcccaagtgccaccctctgagataatgtcagtgagaagccccattctacagaagacaaaactgaggctgaagtgagaagtagctggcccgagggtgaggggctctgtggtggtaacactacccactgcccccagcctccatcattggttctgaactaacacctggaaggggcttcagccacaggcgagaggcccaataaatagggcgagcaccaagctccaggatgttggtgtggcagctcaccactgctgccccgctgccccgctgcagccacagccactccgatgctgaggctgtgcgccctggagctgctcctaccccaggactgtgcggcagtgcgtcagcaagactctccccacagtgtcgcaggattcctccatgggcaaccccaaaaccagctcaaggatgccccagcagcctggcggtgccctccttcccaggtctgaggtgctccccatcccccattccttacaggcaattccagcaatggatgcagctcttacacgtcctctgcttctgcagcagaaccaaaagaacaagcttgggttcccgtttgcactgcagtggcaggtccaacacccacccctgattttgggccctgacccaggtcctccacaaaaacaagtggcccactggggaaaactcacactaattcccgagagttcaagagctgatggagtgacccaccgagaacactgggggtcctgggagcaggaaactccactgggagcacgggactttggggacccgcctccaggacaggctggagtgtgtgaatacaaacatgaaggccacggcagggaggcagagtgggttaaagaagttaacataggctgggtgtggtggctcacgcctgtaatctcagcactttgggaggccgaggcaggtggatcacctgaggtcacgagttcaagaccagcctgcccaacatggtgaaaccccatctctactaaaaatacaaaattagccaggcgtggtggcaggcaagtgtaattcgttattcgggaggctgaggcaggagaattgcttgaacccgggaggcagaggttgcagtgagccatgatcacaccatggcactccagcctgggcaataagagcaaaactctgtctcaaaaaaaacaaaacaaaacaaaacaaaagctacagtcaggatgagcggaaagaactgaagggcccctgagaagcagtctgtgtcaccccgggaggccccgtccactgctctcaggtcctcctgtccatcccacacctactgcagggatcacaaaaccaagaccccaaagacacttgcctcgcacatgtccgactttttgggccccgggctgctggactcgacgctggccccctctgcggggctgtgcgcacgcatccgactgttcatctgaatgccaccttcctcttcttccgcctgctcaccctggccaggactgtcctcattcccatccccttgaggaagtggggcgtgcagcacctccgtgcagaagagagtgcgggggccgtggagctcgcagaagtggcagagagccacgatggcattcatggtgccttggagactgcaacaggcctgcgtgggacaggggacatgtcagcttgccaatgcctattgactccatgaaacctccccagcccctctggagcacagggagcacctgggtgccatggacttcctgcccaggagaggccacccgccagttccccagccccctgccagcactgctttgccccagtgcgagaggaacagagataggatcttcccatgggagtcacagcaaataggggaggggacaatgtggaccaatgatagcacagctggagctgtgacagagccacagccacaaagccaacggcgctggaaaggaatgtcctcaagtgacatgaactgcagccaaacctggcaaaccctgtgagaacaaatagataaaaggccacagggagagggtcctccacccaatacatatctgcttggcacctgctccatgtgggccaaggtgctaggcaacatgatactgccctcatgcagcttacctcctgcagggggtcggcgggggacacaggaaaactgcttcctgcgagaggcccacgcagggaatgaccagaggaggcaggagcctggaaggactggcttacggggccaagcaagagttgaagggcagggtgggtgctgtactgtctgaggggtgtgtaaggtccggtgtccaaagagcagcagcagacagggtggaggctgtaggaagcagatcttatagctcctccaggccaccgaaagaccctggatgtgttatcagagactggggaggctttgggggttctgatgagacatgagaaaatgtgaatttcacttgaataggttcactcatgcccatgtgcagaaaagatggcagggggccagggtggaggtggggaacaagctgaggcaccctgctgactgatctgagcaggaagggacagtggcccaggccaggcagggtgaagacgcacagtgcgggtggggtgcagagtgcggagcagtgagcaggggagaaggcccagtgagtgcctgctgagccttcacggggacgggacacagcagcagagccaagcgctgcggtcggggctgacgcatgggacctccgtggagtgcagcccttgtagactcagaggtggagaagggaggacagctagccaacatgaccaagcacaggcagtgaggccagaggggagctccagagtcaccccagtgaccaggtaaactgctttagcaaggtgggactggaatgtcacatggccttaaaaaggaaggaaaccctgccacaagctacggcacggctgaaactgaaggacattacacgaaatgatctacactggtcacaaacggataaacactgtaggattccacttaaataggaggtacctagagtcctcaaagccatagagacagagagcagaatggcagctgccggggactgggagggaagagcggggctcagttctggagacggaaggtggcgatggccgcacagcactgtgaacatacttcatgccacggcactgcacgccgaacagtggttcaaatggcgcattttaggtcatgtattatttcaccacaatctttttaaaagggggagtggtaacctgcagaacaatgatgaagtcaaaggtgaccttaacacagtttccggtggagaaaaagctcacaggagtgggtagagagagccctttggagagtttccgtggcagagccagcaatgggacacctggtggggacatggagtcaaggaaagccccaagcttggccacagtacagctgcgatgccggcggaaccatgtgaaggccaggggcagctgcaggcacaaagtctgagggacaccaagcactcattgcagagggatggccgcggcagcatgaggcagtatgccttcctaacgaatgcaggaaagccagagaaggctttaaaatgggggtgtgtcatggggttctcactggcagagaagttctggaaacgagaccgcaaaagcaaaggtgcacagtggggacagccacagccaacagcctgacatgtgacacagcctgacacatgcagccagacccacattgtccatacggtggccacagctatgtgtgacaacttaaatttaaaatttaaattagctaggagaggccggcacagtggctcatgcctgtaatcccatgagcctgtaatcccaacactttgggaggctgaggcgggtggatcacttgaggtcaggagtttgagaccagcctggccgacgcagtgaaaccctgcctctactaagaatacaaagattagccaggtgtggtggtgtgcgctggtagtcccagctactcaggaggctgaggcacgagaatcacttgaacctgggaggcaaggttgcagtgagccgagatcgcaccacggcactcgagcctgggcaacaaagtgagactcagtctcaaaaaaaaccaaaaacaacaaaaacaaaacaaaataaaacaaaaaccttagctgggcgtgttggcggtcacctataaacccagctacttgggaggctgagggaggagaatcacttgaacctgggaggcggaggttgcagtgagccaagactaggtcactgcactccagcctttatgacagggcgagactccatctcaaaaaaaaaaaaaaaaaagtagcctggagtggtggcgcacgcttgtagtcccaactacttgggaggcctaggcaggagaatcgctcgaacctgggaggtggaggttgcagtgagctgagatcgtactactacattccagcctgggtgacagagtgagtgagacttcgtctcgaaaaaattaaataaataggctgagtgcggttgttcatgcctgtaatcccagcactttgggaggccgaggtgggcagatcacttgaggtcaggagttcaagaccagcctggccaacatggcaaaaccccatttctactacaagtacaaaaaaaattagccaggcatggtggcgcacacctgtagtcccagctactcaagaggctgaggcgggagaattgcttgaacctaggaggcgaaggttgcagtgagccaagactgcgcaactgcagtccagcctgggcgacagagagactccgtctcaaaataaataatgaattaattaattaatatattagctaggacaaaagctcagcccttctgtctcaccggccatgtcctgagtgtttgctaggcacacacgactcacgccacccctctgaatagcccaggtcacagaatatttctgccttcccagaaagccccattgctttctgggtgtggctggcagggaatggagggctggtgctcagtaggtgcactccgagagggaggcagacaggcagcgggagaggaaacagagtttcaataaagggcccaagtcagacttgcttgggacgatgaagaatcatgtaagtttctgaatgtttgactgagtagtggacactggccaggacccaaagcctcttctcttctggggagcccccacccctgttacggatccaaaagtcagacgttctgtcttcgctcctgacaggcaggctgtgaacacaaacaaggcatggcctgccaaagccgctaactctaggaagaagcaaaggacgatgtgcatggtggtggggggtgctgcagccagcctctctgccggcggcccatgcctggaactgcttcttcagcatgcctgcgaatgcaccacccacctgacgtttctgcagttggctgcttagctgcacgagctgctccggcacctgtcctcctgctgagatacggctgagcacgagtggtcacactgggaatggcagaggcagacagaaaacagacatttgaagagaaccttagctgggctggcagtgaggcaggtgtgggagtcagagagggagaccctgggtgtggctggcagggaatggagggctagtgctctgtaggtgcactccgagagggaggcagacaggcagcgggagaggaaacatacgcatttaacagatggcagaacttctagctggaaggccctgagaactcagcaaagatgcaggctgcaggacaggagagggcagggctggggacaaaggtcaggaatgctccacacaccgtcacctggctcactcctcaccactcggcctccacttgctcccctgctcagagtaccccttgccagcccaccagaagagctcccctccaccccgacaccctcccctgccctgctttgagtcgtagcgctcctcatcgcagaactgcgcctccaaagtgccttcctgacacacaggaagcgccacattcacgtgttagataaatgagaggactgagaagtcgcccttggaaagatgacagctgttgccaagaaaggggcggaatctaggggcggcagaggttcaggagccacagctgtggggaaggccggagccagagtctagtggcacaggaaccaaacagacagtttcaataaagggcccacagggttcactatgatgagtggcttaaaaatctactgctcaacaggagatggggcgaccactgatggagtaaggggtagcaggacccaaaggaaaggtaaaggcattaaactgcgaaaaggaaggccacgcctttctctgagaggcatcaggggaagagaaataaggttccttctagcaagacatgcacaggacagcaagcctgggccaagtctcagcccacctgcagagcacccacactaacctgacactcagcagaatcacgcttccaccgtccacaccagaccaccacacacgaggctgctgccaaatgggtcaggcatggtggtggcagacacccttgaagacctggcgttttctaggtaagagaaaaaaaaaattagagctatttctaagattagaggccttcgtagcatgaaaaataatgggagcagcttacagccagtctcaaataagaacgtgtctgatgaggatgtagacactccccagggttctgaatggcttagcaggcctctgaccttctcagcaggagctgacattttagctgaactcttgcacctctgaggcactctaaaccagtatttgatcaaggatctctgtatttatttttttagagatagggtcttgaggccagctcagtggctcatgcttgtaatcccaacacttcgggaggccaaggcaggaggattgcttcagcccatgagtttgagaccagcctgggtaacacagtgagaccctgtctctacaaaaaatttttaaaaaaaattagccaggccgggcgcggtggctcacgcctgtaaccccggcactttgggaggccgaggtgggcagatcaggaggtcaggagatcgagaccatcctggctaacatggtgaaaccccatctctactaaaaatacaaaaaaaatcagccaggcatggtgacaggcgcctatagtcccagctactcgggaggctgaggcaggagaatggcgtgaacctgagacgcagagcttgcagtgagccaagatcacggcactgcactccagcctgggcgacacagcaagactccatctcaaaaaaaaaaaaaaaaaaaaaaattagccgggcatgcctctagtccaagttacttgggggactaagttgggaggtcacttcagcctgggaggtcaaggctgcaagttcccatctttccttttttttttttttttttttttttgagaccaagtttcactcttgtcacccaggctggagtgcaatggcgtgatctcagctcactgcaacctctgcctcccaggtttaagtgattctcctgcctcagcctcctgagtagctgggattacaggtgtctgccaccacacctggctaatttttgtattttagtagagacagagtttcaccatgttggccaggctggtctcgaactcccgacctcaggtgatccacctacctcagcctccctaagtgctaggattacaggcatgagccactgcatccagccaagtccccatctttcttactcttggttataagggggtgctctggcagcatctacatcacaccaacttacttttcaggccataggcctggcagtttccttctcaagcaggagagggaaaccagaggcaacgctgacaagccacttcccagcacccagagccaacatgggctacactgttttgtttttttttggtttgtttttttttttgcggaagggtctcattctgttgcccaggctggagtgcagtgcagcaatctcggatcactgccacctccgcctcccaggttcaagcaattctcctgcctcagcttcccgagtagctggaattatggccgtgcgccaccaggaccagccaacttttgtatttttagtagagatggggtttcgccatgttagccaggctggtcttgaactcctgacctcaggtgattctcccgcctcctcggcctcccaaagtgctgggattacaggcataagccaccatgtctggccaaaacatgggctactcttattcgtttttccttttaatgaaaagcactcgctgggtgcagtggcttaagcctgtaatcccagcactttgggaggccaaggagggcagatcacctaaggtcaggagtttgtgaccagccaggctaacatggtgaaaccctgtctctactaaaaatagaaaaattgccgggtgtggtggctcatgcttgtaatcccagcactttgggaggccgaggcaggcggaccacgaggtcaggagttcgagaccagcctggccaacatattgaaaccccatctctactaaaaatacaaaaattaggctgggtgcggtggctcacgcctgtaatcccagcactttgggaggccgaggtgggcagatcacgaggtcaggagattgagaccatcctggctaacacagtgaaaccccgtctctactaaaaaatacaaaaaattagctgggcatggtggcgggggcctgtagccccagctactggggaggccgagggaggagaatggcgtgaacccaggaggcacagcttgcagtgagctgatcgcaccactgcactccagcctgggccacagagcaagactccatttcaaaaaaaaaaaaaaaaaaaaagccaggcatggtggtggtgcatgcctgtaatcccagctactggggaatctgaggcaggagaattgcttgaacctgggagacggaggttgcagtgagctgagatcgcaccattgcactccagcctgggcaataagagtaaaactccatttcaaaaaatacaaaatacgaaaattagccaggcctggtggcacgtgcctgtagtgccagctactcaggaggctgaggcaggagaatcgtttgagcctggaagcggaggtggcagtgagccgagatcgcatcactgcactccagcctgggcgacagaatgagattctgtctccaaaaaagaaagaaagaaagaaagaaagcaaaagcacttgtcagacgagagctctgactctgactccatggatcatgtgcaccagaggcccaggcagcccctgaaagagagggaggtgccctacagagcacttagctttgcggtcaccggagcctgccctcaccagccaggtgacaccaagtgttactagacctctctgaataccacccaaaagctgagaaacagaggcctctcagaattcgcattacacatggaatcagaattctgggcagcgtgaggtcattcttcactcactgttcaattccaatctctaccaggtgtttgctgaagaaaacaaactggtttgagtgtgtctcacgagtctgtttccaacaagctttccagaacccacataggaagccgaaatgccctggctgacagtctcttcatcaacatatccaaagacagtattcaaattccctgatgtggtagagtgtctgttcatgtccccctcccacaatggctgagtcccagacctggacagtgacctcaccaccacccgtggtgcgccctggccctatttcaaccctacttcctatggtgttctcatagcaccgtggagaattaaagaggccactaagtaagggcactctaaataaacaaagcactataacggatcttaaccagcagtggacacacagcttctataactagtctcccactggggagcctcattaagttagcagctgggatcccaacaagcccagggtgaaaagttctgcaggggatgactgccagttcagatccactctcactgtggctctatttccaccgtttccctggatttccattcacagagctccctgacataggacactagaagggcaaacgcagtgtcacctgccactattactcaattacttgatgaccacggtgataatctggcactaaactggctgtggccaaaggctagagagccagaacctacttccagcaagctcctccttgccctgtgtccccacttgaagagactgctagtgaccacaccttggacttcaatccacaagccaatccattctttccaggagacaaggacgcgactgacagtactctcaactggagagaagcgcggtcttccaccctccctggaggacacggtgctaccctattagcgcatcagaggaccctcctgaacgccaaactgggagaagaggatgacacacaccctctcctccaaacagagcgaagacaaaacctgggagaagggaaggcaaacagtcccgtttcatggcaacatcaaatgagatcacagtcctcatccccatagacttggttaatgggcgtgcccccaacctatcttcaaatctcagggtctcggcgacgccctggactctggccctaaaccctcccccattactcgtccacctgggaccaacgaaaactcggacatgcccctccgccaacccctcagacccccgcctacctgctccccaaatcgaggcccgcgggacacctggactcggcagccggggtcccgctctgggtcccagccccgcccctgactgcgctgggtaggtggtcgctgcgggacccggaccggcggaatcacacccagagcccccaagcccacggcagggatgtcacccggggtggcgaggctctcaagcccgggttcaggctctcaggggagctggcagaaccaggagcgaccacactcactcgcggtcccgcagccccgccgacacccaggcgcgtgactccctgagccgtaccaccacccaacactgcggtgggggtgcgggagccgtccgagcgcgtcctgcaccgcgaggagagccgggcctccctagctctcgcaagcccaggaacacagtccgagtcctacaactccgaggtctgactgggaagcaggggccgctgcccgacaattacccttttccaccgcccctattccggtgcccccctctgggaagttccgaatggttcagaccgcaccagctggggatgctgggggaaaccatttcattaagcgcgggagtatgctgaaacttaaaaatcattttaaaaagagatttgagggtaaatatagccaacctaaggcttcctgtccacataaaagagaaaaataaagaaaaaacgttataagaggttggcaggctttttttttttgcttcaccaatggtttttattaaattgctgatggaacccgtcctctccctacattgagagtatggaaggtgcgggagacggccgtcacgtgacgcggagaaggcgcggcgcccgtgggaggttggttgcagaactcggaaccgctgtgcgcgcgcatgtgtgggattcggtcttcctccctcagtgggtcttttttaaaaatgtgaaaatcagtttttgaataatattctttttttgagacagagtttcgctttcgctcttgttgcccaggctggagtccagtggcgcgacctcgccttactgcaacctccgcttcccgggttcaagcgattctcctgcctcagcctcccgagtagctggggactacaggcgtccgccaccacgcctggctaattttttgtatttttgcagagacgggttttcacccttttggccaggctggtcttgaactcctaacctcaggtgatccaccagcctcggcctcccaaagtgctgggattacaggcgtgagccaccgcgcccggcctgaataatattttttaaaactagagcgcccattactaaatttagctacttagaagttaattgtaaagccattagtttgtgatgtagtgtgggtccttccagtgaagaccggagagagatgggaatcagagcctgacccgcctgtgcgcgctgccccctgaggtgtggctgccccctgaggtgtggccgccccggagccttccgccgcggccgaggctatggttgccgcagagtctccagaatgtgctcaccaggaatagaatagaaaagtgggtggttgtgtttttgaaatcagaagtcacttatttttttctctttaaatttccatgttctggtcgggcgcggtggctcacgcctataatatcccaacactttgggaggccgaggtgggcggattacgaggtaaagagatggagaccatcctggccaacaggtgaaaccccctctctactaagaatacaaaaaaaattagctgggcgtggtggcacacgcctgtagtcccagctactctggtggctgaggcaggagaattgcttaaacccgggaggcagaggttgcagtgagctgagatcgtgccactgcactccagcctggcacagagcgagactccatctaaaaaaaaaaaaaaaaatccatggtctgttgaaaacgggacacgagaaaagaacgaaagtgcagcttgtgttttctgccgtcttatagtggcttggtaaagattaaggaatatggggtggcgttacgaggttaggcattgcctttatgtgtttaattattcttatcaagcgaattcctcttgctgttggacagcgcaaacttaatttctgaggaggtagtaagttacagggtgattttattttattttattttagagacggagtcttgctatgtctcccaggctggagtgcagtggcgcgatctcggctcactgctacctccacctcccgggttcaagttcttgaaactaatgtttgttaatgagatttttaagtcaagaacaaggtttttttcaccttgtaactttaattccaggaattacctttttcagtttgttagtggagttcaccaccttgctcagattatccttatttccatggtgataggctaatggcggaaggttattcaactagtgtattttcagtaaaagtcaatgtgcatttaccacacctgggctcaatttaggccattaacatctttcccaacaccactggcttcagccacctacctcttttggaggtactttcttaaataaacctataaatctttaaaaaaaaaattaacaactgccaaatctttgcctcagtgaattgtaccaaaggttatttaaattgggctctcatggggtataaaaactttcaaggtcatgcaacaaaagggacatcttagaagtcggaaaatgtgcccattctcatgggaaagataattgaaactcagcagtaatgttcagaaagcacagataccaataatgttcaacaattcacaaccaaatgaaatgcaatgctaatctcaaagcttctatcccataatggaaattgtatgaaatgattccagaagctctggatatgttactgcctggcatgcatacaatccagaatgtgttttttccaccactgaaacaggctcaatcagaattaagatttttttccaccactgaaataggctcaatcagaattaaggttttttgatgcttttctgccttcttactactgctaaaccaagaggcttcattatagctgagtatccaaactgatcaatcacttccaaggcatcagttgccaggaccatagagccaagtggcagggaaaagtcacatcttattcagaaatttgttttagagttttttatatgtacccttagccacaggggctctgatgtagctgtaggatacagctgggctttatctttcagtcaaaccacatgtcaatgactcttagtttccagtttcaggaagaaggggtgtatttcatttgtaagcatttcaatttaatatttttaatcacatctcatattttcaagttactataattgattccctgttataaaaataatgatctaagtttttgtttcttccagcaactgagaaaacattccgtttttagatgttttgaacagtttaggagtctggccagctgctgaaaggcagcaagcaatgagtaacatttcagaaggtgagataaatgcacaatttcttttttttttttttttgagacggagtctcactctgtcgctaggttggagtacagtggcgtgatcttcgctcactgcaacctccccctcccgggttcaagcacttctcctgcctcagcctcccgagtaactgggactacaggcgcatgccaccaggctcagctaatttttgtatttttagtagagacgggtttcaccatgttggtcaggctggtctcgaactgctgaccttgtgatctgccctcccaaagtgctgggataacaggcgtgagccactgcacccagcccatgcacaatttctttctttctctttttttttttttttttcttttttgagacggagtcttgctctgttgcccaggctggagtgcagtggcgccatgtccgctcactgaaagctctgcccccagggttcatgccattctcctgcctcagtctcctgagtagctgggactacaggcgtctgccaccaggcccagctaattttttgtatctttagtagagacggggtttcactgtgttagccaggatgctctcgatctgcctgcctcggcctcccaaagtgctgggattacaggcgtgagccactgcgcccagcctagcccatgcacagtttctaagttcaggttttaggtaattagacaatcaactctgcacataaggcatccagtcagttgcgaggtatgagttattagtggttcaataaaggccattaggattaatttaatatttcttaccatagcaatttctgtaagcttttaaaaattaacctctctccactaattagaattcatctgctatgccttttgtgttttaatctactactaggtgcctattaaataccatgtgttgacattttcgtctaacaatcaactatagagccagcctatggattcagacttattaaatgctttttgcaattaaagttctctgatttcagcctttgatgttaggaaaggatacagataggattttctttgttcactatcattaagtaattcagttacttaaaaagatagccatcacattttcttattcacagatacctgatttacctagtcatttattttctctggcccctttgcaactgctcagacttaggtccaaataacataaccttccacaaagtgggtaccaattcaggttggaacccagaaacttaggacttacaaacccaaaacttcatattttgttttgtgttttttgttttgttttttttgagatggagtctcgctctgtcacccaggctggagcgcagtggtgcgatcttggctcactgcaagctccgcctccgggattcaagtgattcttctgcctcagcctcccgagtagctgggactacaggcaggtgccactacgcctggctaatttttcatatttttagtagagacagggttttaccatgttagctaggatggtttcgatttcctgacgtcatgatctgcctgcatcggcctcccaaacaaagtcctgggattacaggcgtgagccaccgtgcctggccgatctgacggtttttaaaatgggagtttccctgcacaagctctctctctctttgcctgctgccattcgtgtaagacgtgacttgcctcccaccatgactgtgaggcctccccagccacctggaactgtaagtccattaggcctctttcttttgtaaattgtccagtctcaggtgtgtctttatcagcagtgcaaaaatggactaatacagatgacatggagaagatctggcaccacaccttctgcagtgagctgcacgtggccccagaggagcacctagtgctgctgaccaaggcccccctgaaccccaaggtcaacagagagaagataactcagatcatgtttgagacctttaacacctgggccatgtacgtggccatccaggccatgctgtccctctacacctctgggcacaccactggcattgtcctggactctggagatggggtcacccacatggtgcccatctacaagggctataccctcccccatggcatcctgtgtcgacctggctggccaggacctgactaccccatgaaaatcctcaccaagcttggctacagcttgatcaccacggccgagtgggagatcatgcatgacaaggagaagctgtgttgcccttcgagcaggagatggccaccgccgcatcctcctcctccctggagaatagctgtgaggtgcccatggccaggtcatcgccattggcaacaagcagttccagtgtctggaggcactgttccagccttccttcctgggcatggaatgttgcagcatccacaagaccaccttcaactccatcatgaagtgtgatgtggacatctgcaaagacttatatgccaacacgtgctgtctggcggcaccaccatgtactggggcatcctgacaggatgcagaaggagatcactgccctggtgcccagcaccacgaagatcaagatcattgtgccccgccccaagcacaggtactcagtgtggatcggcagttccatcctggcctcactgtctaccttccagcagatgtggatcagcaagcaggagtaagatgagtcaggcccctccatcatccaccacaaacgcttttaaacggactgtgagccgatgagtagcatttactgcatgggttaattccagagtataaatttgcccttggaggccgggcgtggtggctcacgcctgtaatcccagcactttgggaggccgaggtgggcagatcacaaggtcaggagatcaagaccatcctggctagcacggtgaaaccccatctctactaaaaatacaaaaaaattagccgggcgtggtagagggtgcctgtagtcccagctactcgggaggctgaggcagaagaatggtgtgaacctgagaggtggagcttgcagtgagacaagattgtgccactgcactccagcctgggcaacagagcgaaactccgtctcaaaagaaaaaaaaaaatttgcccctggcaaatgcatacacctcatactagcctcacgaaactggaataagcctttgaaagaagtttgtccttaaggtttgtatctgatatcagcactggattgtaaaacttgttgctgattttgaccttgtattcaagttaactgttctccttggtatttgtgtaatgccctatacatctttgatttcaacccttagtacgtgtggcttggtcacttcgtggctgaggtaagaactggcttgtggaagacaggtcagtggtttggtgagtctgtgtggccagcagtctccgatctgtgcagtgtattaatgtgtcagggcagagtgttctgctgtagagcctggtaagggctcctgaaccaattgtttctgtcttgccggtctatcagggttggaaaagtccaagccataggaccaagtttcctctcttagctgatgttttcatgccagaacaccatgagctgctacttgtcttgagttggaagcagttcgtatttccacctgtaaatgtattcatccctttaatttatgtagggttttcttgtactcaattctcaattctttgagatgacaacacattttgtttttttactgttatgtgagaacatcaggccccagcaacacgtcattgtgtaaggaaaaataaaagtactgctgtaaaagaaacaaaaaaaatcggctgggtgcggtggcttaacgcctgtgagcccagcactttgggaggccaaggtgggtggattgcttgaggtcaggagtttgagcctggccaggccaacatggcaaaaccctgtctctagtaaaatgcaaaagttagctagacgtggtggtgggtgcctgtaatcccagctactagggaggctgaggcaggagaattgcttaaaccaggaggtggaggttgcagtgagctgagatcacaccacttcactccaccctgggctacagaggagactccatctcaaaaaaaaaaattcaggagtctcactgaggtagtagctacagtgagcagataccaccccttaagggttggggaacaaagggaaaagattgggacgaatagaatttaaaattctgaaggagggcacagtgggaagatgggggaggcctgcctcctgggcccctttatctctaaggggctgtgctgaggctgattctaggagcatgggggaaactgcacactggaagcagacttgcctggaccatgctgctcaacagaggcagatgcagggagcctgtcactttctcccccgagctctaatccccttcttgctggtttgcagaggtctagcccaagaatcacaaagcagaacacagaacaggggattcaaagctgaaacgattgtgaccagctctcccctcaaacagactcagggtttgcaggtactaggacaaggttctaaataacatatcccctttcagttcaagtttccaaaaaatgcagttattttaatgaatccaccttgggtaaaaaattataatagcatccacatcattagcagctcacagtacttttcacttatatagtcacgactgacaagtactagcagttcacagacacattctaagtgattttgatttcagatccagataatgagaagctaattgttttttaaaaataaaacagggtctataattcattacacagataaatgatcatttcccattaaatattttgtttcctaagtgcaggtatacgtaaacaagtgaaagggatgcaacccacaaatagtcctaattcaagggctagagaatttgacagtttagttgataggtcagcaaactataggcttcaggtcagacctagcctgctgcctaccttttttttttttttttttttttgagatggagttttgctgttgtcgcccaggctggagtgcaatggcatgatcttggctcaccacaacctccacctcccgggttcaagcgattctcctgtctcagcctcctgagtagctgagattacaggcgcctgccaccacacccagctaatgtttgtatttttagtagagactgtttcaccatgttggtcatgctggtctcaaactcctgacctcaggtgatccacccgccttggcctcccaaagtgctgggattacaggcatgagccaccatgcctggccactgcctactttttataaataaagttttactactaaaatggccacagttacaataggccatatgacctccaaagcctaagtgtggactctattagggtaactttttatgtgactcatgaggtttcttttcttttcttttttttttaatagagtcttgctcttgtcacccaggctggattgcagtggcatgatcttggctcactgcaacctccacctcccgggttcaagcgattctcctgcctcagcctcctgagtagctgaaattacgggcacccaccaccatgcccggctcattttttgtatttttagtagagatggtgtttcaccatattgcccaggctggtctcaaactactgacccaggtgatcacctgccttggcctcccaaagtgctgggattacaggcgtaagccactgcacacagctgaggtttcttttttaaataatgaaaatgtgccttaccagacaacttgaaacattttaaaaactgaatgtttgtagtgagagagatttttttaaggaacaaatttgatgtgttttaacctgaccacactttattctgctccacaccattccagggctaaatcagtaaatcctagtccaaattcctgtgacaggagaggccctgaacataatcaaaatgcaactatcagtttacctgatatgctttgacaagaaaaagtgggaaagcctgccatttgtctcttaaaaactgtaagttgagagggggagaaaagccattttcaagactacaaaagtgtagcacccactaaaggttggaaagtgcttttgacaccacctggacaacatggcaaaaccccatctctacaaaaaaaaaaaaaaaaaaaaaaggctggctgtggtggtgctcgcctgtagtcccagctacttaggaagctgaggtaggagaatcagctgagcctgggaagtttaggtaagccatgatggcaccattgcactgcagcctgggtgacagagaccctgtctcttaaaaaaaaaaagaaaaaaaagtgaagcaccaatggcatctcataatccacaactcatactctcactaatatgcatgttaattttaattttaaaaattagcttatgcctcagggacgctcctacccttttttttttttgtaaacagagacagggtctcactatgttggccaaggtggtctgaattcctggcctcaagcaatcctgcctcggcctcccaaagtgctaggatattacaggtgtgagccactgtgtctgtctggcctttcttttcttttattttctgaagacaatgattacaacttttagatttttttgtagatacaaatttgtcaataaataaaaacctttcagatccaaatcttccaaaaattcctaaaatccagctatttctgttcacaatgaatgtgcttattaaaaacttcagaggagaaaaaagtgatacagaagacacattaatgttcaagcaacttaaaacaaaaaggtagatttaatgcagtaacaataatctgaggataaataaatccacgacagactttaaagtttgcaaatctgtttcctttctttgcagagaaaatggttttctgaaagcacacaggactgaagatgtcaaaacaaaacttaatttcttagtctccaggtgacacaggcttggtcctctctgctgccctccgaacacttgtcactggccaagatggtagtttctcttgtttagctcaggatggatgttagtttcaagaataactggatggtttgtttcctgaatcatcttcttgtgagcccatactctgtaaaggtaaagtgaagttatgtatttatgtttgcttttatcaagggttccccggcagcccaataagcacaccagttgccctgtccctcccagaacaaagccccctgtgaacaagggcaggcaattccaggaaccaccctaagcatccctaagtgtacttccaggccatcatttgaaaatgctctcaactagtatttctccatgaccgtactggtaaggttttcaagaaatatttaataacctgaaacttagttcctgtgcctgatgtgacaacacccctccttctccacccagcctacttcttgtaataagggaaccctcatcaccttttgtacaaactgagggttcactgtgatctcctggtccatggctttcagccgctcatccagctcaatgcacttcagcatctgcatgacaggcacattagaaggtggtcagcggcgggtttaggtcagctgcatcctttctaacttacactgttcacaagggtgctataggttcacaatctcttgatgtgaaacccctggggccacatgggttttggagccagagtattttggactcagaaagctaatacatctatcatataataccaaatatcccacccagcaggatctaggcaaacctcataatcaaacacatagtatcttttgcagtgaaacgagtatattcatgctgagataaatgaagactagacaccatttcaggtgacattttgccattaaattaattacaaaaaaacatagttttctgagatttaatattcagttcacttccctgctcagaggtaagaaacacagaccacccacaaaactcccccttcagcccccagaatcagaggcagcatgccctcaggagacacagaggtgactgctgcagctgtagccaggctgttgcctaaaggggaccgtcagggagggctttgctcttctcctccagccaccccgactctgcttctcacatagggagagatgtttcctaacctcccaacctggaactccacagacatttcagcaaaaacataaggctctatgttgtaggtggcagctgggaatagataaagttatactgggccctttaagtgttttcacagttaagggaggttttgatgagttagctgggatatctaacccaccatttatttacagccatacaatctgagagagttttgtttttttgagacagagtctccctctgttgcccaggctggagtgcagtggcgcaatctcagcttactgtaacatctgcctcccaggttctaagagactttcctgcctcagcctccagagtagctgggattacaggcgtgcaccaccacacccggctgattttttattttttttagtagagacggggttttgccatgttgggcaggctggtcttgaactcctgacctcagctgatccacccacttcagcctcccaaagtgttgggattacaggcatgagccaccacacccagcctggaagagttttaagcagcccattctgggtttcttttgttgttgttgctgcttttcttgagacagagtcttgctctgtcacccaaggtggaggacagtggcacaatctcggctcactgtaacccgtctccagggttcaagcaattctccttaagcagcccattttgaaactaactttctagtaactaagatgttcacagactgggaactacctgtacttaaaactaaaattatcctggaacataggagcaattttcaaatacatctcaaccatcaattaaaaaaataaaaacctggcattcatgtttacctcctgatcaatgttatgaagcatggctgggttattatatttttcagggttatcatggaaactgaccataccgtccttctggttaatacttgcaaaaatctcaccatcttctatctgcagaaagaaaaaaaaaaaaatcaggaaagcagtttagacctgaatgctatatgaatagtcatccagtataatcacagaaaagcatggaaggcaacatggatataaataaacttgtatatttttaagcgccatctgtttatccaagtatttattaaatacctactatttgctaggcaccattatagatgctaagaggtgtaaaactgatacacacaaaatccctgcccttgcatttttgttattgaggtgaagtccacacaacataattaaccattttatttatttatttatttatttatttgagatggagtctcgctgtcccccaggctggagtgcagtggtgcgttcttggctcactgcaacctctacctccggggttcaagcaattctcctgcctcagcctcccaagtaactgggattacaggtgcccgccaccacaccaggctaatttttttgttgttttttttgagatggcgtttcgctcttgttgcccaggctggagtgtaatggcacaatctcggctcactgcaacctccgcctcctgagttcaagcaattctcctgcttcagcctcctaagtagctagcattacaggcatgcaccaccacgcctggctaattttgtatttttagtagagacagggtttctccatgttggtcaggctggtctccaactcccgactttaggtgagccatccgcctcggcttcccaaagtgctgggattacaggcgtaagccaccgcgcccagccatttttttgtatttttaataaacacggggtttcaccatgttggccaggctggtttcgaactcttaacctcaagtgatctacctgcctcggcctcccaaaatgctgggattacaggcatgggccaccacatctggcctacctttttaaagtgagcaattaattggcatttaatgcattctacaatgttgtgccaccaccatctctatctagttctggagcattttcgtcaccccagaaagaggccctaggcccattagcagtccctccccattccctccttctcctcccagcccctggaaaccaccaatctgttcttgtctcgtatggatttgccttttctggatatatgaatggaatcatatactatgtaatcttttgtggtctggcttcccttagcatgatgtatttgaggtgcccttgcatttttcaacatcagctgcactgaaatataacttacatcgccttttttttttttttttttgagatggggtctcgctctgttgcccaggctggagtgcagtggcttgatctctgctcactgcaacctccacctcctgggttcaggggattctcctgcctcggcctcctaagtagctgggactacaggtatgtgccacgatgcccagctaattttttttatttttagtagagatgacgttttgccatgttggccaggctgggccactgtattttaaaaagtaaagcctaacacgttttcttttcatcccagtggaaactatcttccgattcttcaagaaaactttactaccactggggattccaaggtagattcaaggtctatatattatttatttgcatcagttactggggaattatttgactgatcctcaaagccaaatcctgcccatgaagttaaaaagtgagataccaataaaagtacaaaacaggtattttattcctaacaagatgttccacacggtgataataacttgtccatttgttagcagtgaaactgctggcctacttgtctctagctttggaagggatagatgctatttagtgaaacagtaaccagcccaatacatattatacaaaatgcatagttctctatgtgatcacagagagctgcctctttaagcagatggaatgtatctaagcaaaatttggacctaccttcaccacagcagcactattcataataaattaaccagaactggaaacaaccccaatgtctaactatttatttatttacattatttgagacaagagtcttgcactgttgcccaggctggagtgcagtggcgcaatctcagctcactgcaagctccacctcccaggttcatgccattctcctgcctcagcctcccgagtagctgggactacaggcatctgccaccacgcctggctaattttttgtacttttagtagagacggggtttcactatgttagccaggatgctctcgatctcctgacctcatgatctgcccgcctcagcctcccaaagtgctggaattacaggtgtgagccaccatacccggcctatttatttatttttttggagacggagtttcgctcttgtcacccaggctggagtgcaatggtgtgatctccagtcactgcaacctccgcctcctgggtttgagcgattctccagcctcagcctcccaagtagctgggattacaggcgcccgccatcatgcctagctaattttttttgtatttttagtagagacggggtttcaccatgttggccaggctggtcttgaactcctgacctcaggtgagctgcctgcctcagcctcccaaagtgctgagattacaggcaccacgcccagcctgtccaactaattaaaatggaaaggtgtatcaaacactggaacattgtagccctgaaaacgaatgaactacggctacatacagcatcatgcatgactctcacaatgctgagccaaaaaaccagattcccagaaagaatgtgctgtgtgtttccttctacatcaaactcagaaacaaacagaactaaaataggatgttagaagtcaggatgggaggccgggcacggtggctcatgcctgtaatcccagcactttgggaggccgaggtcaggagatcaagaccatcctggctaacatggtgaaaccccgtctctactaaaaatacaaaaaattagccaggcgtagtggtgggcgcctgtagtcccagctactcgggaggctgaggcaggagaatggcgtgaacctgggaggtggagcttgcagtgagctgagatcgcaccactgcactccagcctgggtgacagagcaagactccgtctcaaaaaaaaaaagtcaggatgggaacaacctttctagagaggcacagggctggaagcagacacaagggatattttccgggtgctggtcatattctgttccttcttctaggtgttggaatctttgtgaaaatgtgtttagccgtacacttaagtgtacttttccaatgtttactttaaaaaacaaacaaacaaaaaaaaaccctggtctcacagacctttcattccagaagggtttctcaagcctggcagtcctgacatttgggggcagataacgctttggtgtgtgggctgtccagggtacagataacgctttggtgtgtgggctgtcctgggtacagataacgctttggtgtgtgggctgtcctgggtacagataacgctttggtgtgtgggctgtcctgggcactgcaggacgtttagcagcatccctggcccgtacccattagacgccagtagcacccccatctgtgaaaaccaaaactgcttccagacgttgcctaatgtctcctggcagacaaaatcaccctcagaggagaaccactgctccagagcctgtcagggtgtctgggctggttaagcagggctcaaaactcacacccactttgaccccgcaacgcgttgctagctagtatgtcctgtctggtgtcataaccactcatgtatttcttctcactcgccactgaagagggaatttcttggggaaagcgtctatagcttattctgtgtaacccctgtggggttaccaagatgctcttagcagacacaagtcatagaggtatggttttgtttggtgtgtgcatgttttgaatggtaggttgaagcaaaaaaccctttagaacacttgtaaattcaactatcaaaatgaaatactcagctgggtgcagtggctgtatccagctgtaatcccagcactttgggaggccaaggtgggaaggtcacttgaggccagaaatctcaagttatgcctggccaacataaagagaccctgcctgtacaaaaaatttaaaaattagctgggtgtggtggcacacatctgtagtcacagctacttgggaggctgaggtgagaggatcatttaagcctaggcagtcaaggctgcagtgagccatgattacgccactgcactccagcctgggcaacacaggaagaccttgtctcaatcaatcaatcaatcaatcaaaatactccaaattctgaaatcatacaaggggtcatatgaagctttgcctgtcctgagctaaggacacaggttttcagtgaactaaaaccagatcagaactatgtacttatgtaactgaataggtaggtagattacaatacatcaatgtggtgggttatcatatagtcatttaaatgatgcttatccaaatcaggagtggttgcctggttggggtggggctgagagtggggaaatgcaactggcaggtgataaagagggagtgtcagggcactggtgctatttcatttcctaagctggatgctaagtcctgggtgtgtgctctggcctcctttatgtcagtgctgcttatggaccaaaaccctcagtgacggaagaggctaagtcagaatgtcagtcaatgatgtcgctaagcacactgtgtagttcagcaaacattgttcagcaagatttcttgctgcagcagttgcttgatgtacgtactggcaaaagcttgtgatctcatcacagataagcagaggaagtagccctaccttatacctctttgtataccaaaaatatttcatgagggttatgaggtttacaaaaattctgataatgaaaatatgtaaatatagccgcctgtaataccagctactcgggaggctgagacaggagaattgtttgaaccctggaggtgggggttgcagtgagctaagatcacaccactgcactccagcctgggcaacaaagcgagagtccgcctcaaaataaaataaaagaaaataataaggagtacagggctgggcacagtggctcacgtatgtaatcccaacaatttgggaggcctaggagggcagattgagcctaggagttcaaatccagcctgggcaacatggagaaaccccatctcttcaaaaaaatacaaaaattagtcaggcatggtgacacatacatgcctgtagtcccagctacttgggaggctgaggtgggtggattacttaaacccagggaattgaggctgcagtgagccgagattgcaccactgcacaccagcctgggcaacaagatgaagccatctcaaaaaaaaaaaaaaaggaagcacaaataggacgcaagcctgatgtgtatatcatatgagcacactaaaactagaaactataaggaaacagaccaaattgtcaatagtggtagactttggaggctccccccgcttttctcctttttaatattttccacaatgaacatctgttactcttacagtaacaaaaatccagtaattaattttcaaaaaaatgaaaatcaaggccaggcacggtggctcatgcctataatcccagcactttgggagcccgaggcgggcagatcacgtggtcaggagtttgagaccagcctgaccaacatggtgaaaccccatctctactaaaaatacaaaaatttagccgggcatggtggcgcatgcctgtagtcccagctctcgggaggctgaggcaagagaatcacttgaatccgggaggtggaggttgcagtgagccaagactgtgccactacactccagcctggtgacagagcgagactccatctcaaaaagaaaaaaaaaaaaaaaaaagaaaaagaaaaagaaaatccacttaccatgtgcagaacgtatttctctgcctcctgaggtccagacaactgcacacgacttgccatatcttgtaatgatagagttaaaaaggtctgaaagtcagaagcagaattagtcacaggtaggaacaacgaaggaaggacattttattaaatgtgtacagagcggccaggcgtggtggctcatgtctgtaatcccagcactttgggaggctgaggtgggcagatcatgaggccaggagattgagaccatcttggctaacatggtgaaaccctgtctctactaaaaatacagaaaattagctggtatggtggtgcacgcctgtagtcccagctacttgggaggctgagacaggagaatcgcttgaacccaggaggcggaggttgcagtgagtggagactgagccactgaactccagcctgggtgacaaagtgagactctgtctcaaaacaaaaaacaaaaaacaaaaaaagaattagccaggcgtggtggcatgcgtctgtagtcccagctacttgggaggctgagacaagagaatcagagaattgcttgaacccaggaggtggaggttgcagtgagctgagactgcgccactgctctccagcctggacgacagagcaagactctatttcaaaaaaaaaagtgtacagagctcttcccattgatgtacagaatagatttgtgtagatgacttaaaactgatgggcgaggggtggtggctcacacctgtaatcccaccactttgggaggccgaggtgggtggatcaattgaggtcaagagttccagaccagcctggccaacatgatgaaactccacctctactaaaaacgcaaaaatttgccaggcatggtggcaggcacctgtaatcccagctgctcaggaggctgaggcaggataatcgcttaaacttgggaggtggaggttgcagcaagccgagatcgcgtgattcactccagcctgggcaacagagtgagactccatctcaaaataaataaataaataaataaataaataaataaataaataactgataggctgggcacggtggctcatgcctgtaatctcagcactttgggaggcccaggcgagtggatcacgaggtcaggacatcgagaccatcctggctaacgtggtgaaaccctgtctctactaaaaatacaaaaaaaaaaaaaaaattagccgggcgtggtggtgggcacttgtagtcccagctacttgggaggctgaggcaggagaatggcgtgaacccaggaggtggagcttgttgtgagccaagatcacgccactgcactccagcctgggcaactgagcaagactctgtcacaaaaaaaaataaaaaaataaaaactgatgaacccagtggtttgtcaatttcctagaggagtaatgaaaaataattttatatatatatgtaaactgaaaaggaatccaaggtatgcacatcattatgaagattttcatcttttgaattttgtattataaatgtataatctattaaatataattgaaaaaataacattcatcattcaaaattcaaagttaacatttttaaacaaatgggggagttaaataaaagaggctacacacttgtgatgagggaaaccagtgtttaccactgctctcttgggatctgatgaaaatgacccctttcagaaacatattaaaagagctctattcttaatggcagctggtaatatttacaacaatggcattttcagagctgggcatattaaaaccctcatcttgaaaattccttttttttttgagatggagtcttgctctgttgcccaggctagagtgcagaggcgcaatcacagttcatagcagttcaagggaacctcctgtttcagcctcctgagtagctgagactacaggtgtgcaccactgtgcccagctaattttattgttttattttttgtagagatgagatcttacttagttgcccagactggtttcaagctcctggtttcaacgtatcttcctgcctcagctccccaaagtgctggaagtacaggggtaagccactgtgcctggccataaattcttgatgagccaataattttaaaacctacatatactttagttcagagaatagtacccaagaaattgaaattactgctaactttaagaagtacacaagtagtttaacacaaacaaagactcaaaagtcaacattctagcctgaccaacacagtgggatcccatctctacaaaaaatgtaaaagtaggccaggcgcggtggctcacacctgtcatcttagcactttgggaggccaaagtgggcagatcacttaaagtcaggagtttgagaccagcctggccaacatggcgaaaccccgtgtctactaaaaatacaaaaattagccaggtgtggtggtgtgcacctgtagtcccagctactcaggaggttgaggcaggagaatcgcttgaacccaggaggcagagtctgcagtgagcaaagatcgcaccactgcactccagcctggacaacagagcgagactcagtcacagaaaaaaaaaaaaagaaaaaataccaaacaaacaaaagagcagggtcaagaatagcacgtagagtatgaccccaattacatataactgggagagtctatgcatacacatagaaaagaaacagagaagaggaacctagaaaaacatctactaggccgggcgtggtggctcatgcttgtaatcccagcactttgggaggctgaggcgggcggatcacgaggtcaggagatcgagaccatcctagctaacacggtgaaaccccgtctctactaaaaatacaaacaattagccaggtgtggtggcgggcacctgtagtcccagctactcgggaggctgaggcaggagaatggcgtgaacccgggaggtggagcttgcagtgagccgagatcgagccactgcactccagcctgggagacagagcaagactccgtctcaaaaaaaaaaaaaaagaaaaagaaaaagaaaaagaaaaacatctactaaaatgttaacacaaagtaatatttcaatgggagaggtggcagatttaacccatccccagctgccttccatcccagccatgccatcacctactgatacagtctacctgttgagacttctttggattttctagtaagaaaaacttggctagaaaaatcctttgatgtttccccgttcttttcattttagcactgggacatcatgccaaaaatggagcagccactatcacagatgtaaccttctgactagctatgtcctttaaagacacggttcctgcccaccataccttatggtagccctccccaggtccctctggcaggcagtgcttgtgagctcagtgtaccacaatccaccacttcgtgtcaacatacgaaggacccaggaccttgatgactttgtgagtcactaccccagccctggaaagaccatttcgagttgagactcttcctgtttgatcaaaaaaaaattttttttgagacggagtctcactttgtcccccagactggagtgcagtggtgcaatctcggctcactgcaacctctatctcctgggttcaaatgattctcctgcctcagccttccaagtagctgggattacaggtatgtgccaccacgcccagctaatttttgaaaccgttatttaattttcatttgctattttgcaatttaacatcttttgtaacatgtactatcttttatgtttgttagcatttgggttcttttatctaaacttcaattactagtcacaaacagagtttgtgtttttaatggcagctgttttttaatggctacctcttgatggcaaaagacagaaatttacttagaatggttctgttggcacttgggccaaaaagaaaattttatggagagaattaggctgcttgttatttaagtctcttagatcctggtcttttaaacctgtaggtcaagctggtttttctggctcacaagttacactggttttgatctttgacttgatttctctttcacgttcttcatttttctctcataaaaattaactttttacaaattcactactgatttccttctattctagaagctatggctagtctttctagagtatttggaaggattctttttcttgcccattgaccctctcctcaccttccttcctcttctccttaggatcctttatccttgtatgaggtctgcccacctcaacggccaccccgacccacctctcttctctagcttctccattgggctaggggaagtcacctctcccctaagtcctcacgtagccaaatccatcagccttttccattgctgggtagcctagcaaaaaaacagctaccctattctggttccttggctcgtccccaaccatgcatcaccatggctgacacaaggcaaaggatgtgcacaggaacagatgcactgtgttctcagcagctgtgaactatgcatatctggccagacttcccaagagaaaaaagcaatcctctatttgttgagctacaggattcctgtaacttgcagcctataccttcctaaaacacaaaaaatttcatttttcattatttttctgtactgtttgaacgtttgacattaagcatattttctatagtcaaaacctagcaggttattttcatcttgacaataaaaattatagaattggcttacatcctagaagaaaataaaaattatataattggcttacatcctagaagtcaattgcacaaagtttgtacaaccctggcctaaatggtaatgtccgagtagtactatgttcacataaggtgttctcattggctgggtgcggtggttcatgtctgtaatcccagcagtttgggaggccaaggcaggtggatcacatgagcacaggggttcgagaccgcctggccaacatagcaaaaccttgtctatacaaaaaatacaaaaattagctgggcgtggtggctcacacctgtggtcccagctgcttgggaggctgaggtgggcagatcacttgagctcaggaggcagagggtgcaatgagccgaaatcacgccactgcacaccagcctgggcaacagagcaaggcactgtgtcaagagagaaaaaaaaaaaatgttctaatagagatcagcacagacagaacagacaggttgcaaggctggtgacagtgcactgaggtctgcatcattagcatccctcatctgccctgctggagctgctgacctctctgaggctgcctttcactgtctcccaatgtagccttgtctcctacctttcttcctcttcacctgctccaaataccctgctctagccctgaaaagaccaaaggtatacatcaaattctttctaagaagccaatcacaagagagttctctctcagcacagaaatcctgccatgctttatccctgtacctgcttcctcagctctgaaaagggagagaaagggaaacatggcccccagggggtcaggagctgccctgtgaaggtggcactttcctcacctttgttagcctctgaatattcttcttataaagagatgacaagcattgcttcaccagccccatgttgttatcgcgagtgaaggtttcactgtgcttattcaccaggtttcggagttctgaggggttgttggttgaatacacttgtgctaactcgtggtatgcattgctaagaggctaaagatgcaaaggagggaaaaaattcagattaaaacttcagaagaggccaggtgtggggactcacgcctgtaatctcaacactttgggaggccgaggcggacaaatcacctggggtcaggggttaaacaccagcctgaccaacatgaagaaaccccgtctctactaaaaatacaaaattaactgagcgtgatagcacatgcctgtaatcccagctacttgggaggctgaggcaagagaatcgcttgaacccaggaggtggaggttgcagtgagccaagatcgtgccactgcactccagcctgggcaacaaagcaaaactccgtctcaaaaaaaaaaaaaaaaccaaaaacaaacaaacaaacttcagaagactcaaatgtgtataggaagcaaaaacacacttacatactattttttaagcaagtatatcccatattgtcaggtaactacacactgttaccctacaaattataatttacccaaagcaaatgcctggtttttaagaccagggatagaaagtcactatggagtaattcattttccacaaaattttgtactacagaccaagtaataacacagcaggtgaaaacccactgaatttagtgaaggcacacgtcttcatcagtgcttctgtttttctactgataaatcatatagagaagaaaggagtcaaaacattcatcattcccaactctccctctctctttctcacacctcaccagatgcaacaggacaatctgctacttctgctagcaagaaggaagacagggccgggcatggtggctcacgcctgtaatcccagcactttgggaggccgaggcgggtggatcacgaggtcaagagatcgagacaatcctggctaacacggtgaaaccacatctccactaaaaatacaaaaaattagctgggcatggtggcacacacctgtagtcccagctactcgggaggctaaggcaggagaatcgcttgaacccgggaggcagaggttgcagtgagctgagatcacgccactgcactccagctttggtgacaagagcaaaactccatttctaaataaataaataaataaataaaatgaaaaatataacaaaacaaaataaaggccaggctcagtggcacacacctgtaatcccagcactctgggaggcagacgcagaaggactgcttgaggccaggagttcaacaccaacctggccaacatagcgagactctgtctctagggaaaaaaaaaaaaatcaactgttataggagcttaaacatctatagctgtaagtatctagagcacaagtttgaaaacgggttcctgagaaatattccattccaatcaggtaatgagaatgtgtagcagacattcaataaatgtctgctcacctgaagctgctaggagagctaaatcagtataaaacgaagttacagaactgtatcattgcaatttctttatatactcaacatgctcacgtaagaaatcagttttatgtaaaaaacttaccttaatgaatctacccacaatttgagatgtatattttggtagctgttgtactttgccaagtaatatcaaagacactaaaatatactttttatatgattccaacatgatatgactgaccgccatggcaggagtagttatagcctaggcaagagaagaatgcttgctgtaaagagaacataccacagtagcaaacaacaatcaaccacatgtatcacattaattataagtcaataatactttttaaatgtcccattatttttataacagccttattgagatagaattcattttatttttatttatgcattttttagagacagggtctcgctctgtcatctaggctggagcgcagtgatgtaattatggctcactgtaccctcaaactccttgggttcaagcaatcttcctgcctcagcctcctgagtacctgggactataggagtgggccaccatgcttgactaattttaaaattttttgtagaggccaggcgcggtggcttatgcctgtaatcccagcactttgagaggccgaggtgggtggatcacgaggtcaggggatcgagaccaacctggctaacacagtgaaaccccatctctactaaaaatacaaaaaaattagccgggtgtggtggtgggcgcctgtagtcccagctacttgggaggctgaggcaggagaagggtgtgaacccaggaggcggagcttgcagtgagctgagattgcgccactgcactccagcctgggcgacaaagcgagactccgtctcaaaaaaaaaaatattttttgtagaaatggagtctcactatgttgctcaggctgactcctatgttgctcactatgttgttcagtcttgtactcctgagctcaagcaatgctcccacttcagcatcccaaagtgctaggattactggcatgagccaccacgcctggccactttcttgtctttttatttttgaggacgagtctctgttacccaggctggagtgcagtggcgcaatcccggctcactgcaacctccatctcctggttcaagagattctcctggctgggcgtgttggctcatgcctgtaatcccagcaatttgggaggccgaggcgggcggatcacgaggtcaggagatcaagaccatcctggctaacatggtgaaaccccatctctactaaaaatacaaaaaattagccaggtgtggtggcaggcacctgtagttccagctagtcacgaggctgaggcaggagaatggtgtgaacccgggaggcggagcttgcggtgagccgagatcgtgccactgcactccagcctgggcgacagagcaagactccatttcaaaaaaaaaaaaaagagattctcctgcctcagtctcctgagtagctgggattacaggcgcctgctgccaggcccagctaatttttgcatttttagtagagacattttcaccatgttggccaggctggtcttgaattcctgacctcaggcgatttgcctgcctcggcctcccagtgtgctgggattacaggtgtgagccacctcacccagcctcttgccttttcttttttttttttttttttttgagatggagttttgctcttgttgcccaagctggagtgcaatggcacgatctcggctcactgcaacctccgcctcttgggttcaagcaattctcctgcttcagcctcctgagtagctaggattacaggcatgcaccaccatgcccagctaaattttgtatttttagtagagatggggtttctccacgttggtcaggctggtctcgaactcccgacctcaggtgatccgccggcctcggcctcccaaagtgctgggattacaggcgtgagccaccgcactcggacgcctcttacctttttaacacccactcatcctgatatttcaagatcaagtttgctcatgagttaactatatttggctacagcaatgataatgcatccagtggctacgaagtgcatttttataattttccgaatgcgtagtcttaaagagaagccaccttgaagatttaacctgactagacacgtgctttaatgacaccatctctgcctactggcaccttatggtggccctcctcaggtcccctcaacaggacacatcaaccactcattgtggtatggttcagagccacggatgtgtgtacatgtatgcatgtgtattatgtattagaattccaactaaaccgagctctctgaaggttttaaatatcctttattacttaatacatgctatgaactaaataggaacttacgaacatctaactaatttaccttaagtaaagtggtttattaatcaatattgtgtatctctttttcagagtctgagtaaacctccagaatattctaccaaattgtgtactatgtttcattacacagacacagaaagggtgggagggacttttactgtgtactcctttctaccctttaaattttgaatcaagagaatgtttcactgattaaataaaacttaacaaaataccacacatggttttagaataagacacaaccaagatcactcagttcaatctcttccttatatgcaaaggaagctataaaggtcaagagatgtcataacttattccaaatcagataaggtataagtgcaagcctagattagaacccccagacaagtgctcttctatgcactggcgctgctcctcaacttagggatcaggttaccactatttacatgatcacagagaagtagtctctgaaaggaccaacacctgaaacggaggccctgggatcagaccactctagccacaaacctatgggagcacttttttgatcacacaagttcagaacaacctcagctaatttttagagagattacctgttcataaaagtagagagctctttcaaagttcttcagcccagtatagatcatccctccataataatagtaacataaaaagtgttttgcatcataggctccattctctttacagatatccatcatatccacgtcaagatatggaagggcaggcttaaagcattttgctagcaaacaaagctgtgaacaaattgatattaaatcatcactttaattttacttaggcaggtattagcagaaggagaaaattcattgattccagaaatttccaaataatgtaattgtgttttacattttattgactaaaattatctaaatgtcaacacatttcatgtatctgctatctgaaatgcttaggaccacaagtgtttcaaattttggaatatttgcagaatacataccagttaagcatccctaatctgaaaacctgaaatccaattgctccaatgagcactttgagtgccaagttggcattctaaagatttcagattttggagcattttgggtttcaaatttttggattgggtttcaaattttcagattaggaatagtcaacctgtactccattttcttagccattcagaaaaaaacagcattacctttttttttttttttgaaatggagtctcactctgtcacacaggctggagtgcagtggcgtcatctcagctcactgcaacctccacctcccgggttcaagtgattctcctgcattagcctcccgagtagctgggattacaggcgtgcaccaccacacccagctaatttttgtatttttagtagagacagggtttcaccacattagccaggctggtctcgaactcctgacctcaagtgatccgtccaccttggcctccgaatgtgctaggattacaggcgtgagccacctcacctgggggagcatttctttataaaaagctaaacagctataaggccaagcatgctatagatgattgagaatagagaactctacagacaagactcacttatctcttaacctatccctacccatctgattagagggaaaaagagtgtgtcctctttctttactgaactagtggaatagaaagagaccagcatggtgtgatacaagtagaagtggttcctttaattaatcctttaggtaaatacagggaattgtgcaactcaagaaagcaagcccttagaacagttatctagctaatggagacgcagtgtagacatgcgtacaaactcactgagctatacactttagtattttactgtctatatgttgtacctcaatcacaatttttttaaaacattaaaaagcacatcttcatatgaaactagaacatgtgtttgaaataatccacataccatgttattcttgaaggaaacaatgtaaatatcccatgcagacttctaaaaccatcgcatactcatattatagaatactccgtacctgtagagtactgctacagaatcatctccaagatatgttaaatacaaaaagcaagctacataagagtatgcatagattattacaatttgtgtaaaaaatgagaaaatatatattcgtatttgcttttatgtccataaaaagtttttggaaggatacacgagaaataactaacatagtttcctttgtagagaagaaatagatggctagcaaacagaatgggaaggagacttcattatatacctgcccttttgccttctggactttgaacatcgcaaaataagataaataaatgaggccaggcacggtggttcacacctgtaatcccagcactttgggaggctgaggtgggcggatcgcttgaagtcaggagttcaagaccagcctgaccaaaatggtgaaaccccatctctactaaaaatacaaaaattagccgggtgtagtggtgcacgtccacaatcccagctactcaggaggctgaggaaggagaattgcttgaacctgggaggcggagcttgcagtgagcctagatcatgccactgcactccagcctgggcaacagagcaagactccatctcaaaaaataaaaaaaaaaaagataaatgaataacattttaaggtgtaagaagttagctatgttaagtctcaggttccacaatttttttttagtagagatgggatttctccatgttggtcaggctggtctggaactccggacctcaggtgatccgcccgcctcagcctcccaaagtgttgggattacaggcgtgaaccactgcacctggcaggctccacaattttaaaaaaatgattcgggattttaaaaaaagttacaggccgggcacagtggctcacgcctgtaatcccagcactttgggaggctgaggcgagcggatcacgacgtcaggagattgagaccattctggctaacacagtaaaaccccgtgtctactaaaaatacaaaaaaattagccaggcgtgatagcgggcgcctgtagtcccagctactcgggaggctgaggcgggagaatggcgtgaacccgggaggcggagcttgcagtgagctgagatggcgccagcctgggcgacagagcaagactccgtctcaaaaaaaaaaaaaaaaaaaagttacaactagggccgggtgtggtggctcacacctgtaatcctagcactttgggaggctgaggcgggtggatcatgaggtcaggagttcaacgccagcctggccaacatggtgaaaccctgttctactaaaaatacaaaaattagctaggcttggtggtgggtgcttgtagtctcagctacgcgagaggctgaggcaggagaattgcttgaacccgggaggcagaggttgcagtgagctgagattgtgccactgcactccagcatgggcgacaaagtgagactgtctcaaaaaaaaaaaaaaaaaaagttacaactattaattaccctatctgttcgacaagcttactagttgagccccatcctacagtttgcatccagcacccgcctgaatgtaatagatgtacctacatattccaacttctataacacatcacaatatcgccaacttgcctgtgtttatcaaacccaatgttgagcaagcccataaacaacctacacctctgacttggtgtgaatcacacactttggttgcttacctggcagagatcagcatgtattgaggtcagctggtttgtattcatctgcatcttgtctatggcttgcttaaggatgccaattcctcgcaggggctgtcagaaatgacatctctttcagataagttctcaaagatggcagcacattggatcttatgttgtcacttataaataaaaaataacactaattgataggttcctttaaatagcaatatgaggtttccatactctttcaggaaatttctgtcccatttaagtcagaaaacttttcttaagctgtttcttggaatttttagataactcagcaccattttttaaatcataaaaagcttttatttttacaatgaagatcaataatcaaaaacagtattactttctcaacagtttattatattaacatctaaacaaatgaaaactttccaaatcacttattatacaagagacaacagcctatgcttaggaaaattacttgtggctaagggtgttggcattttcccatagggcagtctaccccttacctggtagtaaattactaccaaaactaacaccatagatttcaaaaggactgtttcctgccctgattataaataagaagaccaagtgtcaagtaaggcataatcagtttttggcagactaaaatatagtctcttccaaaattgctgggcacggtggctcacacctgtaatcccagcattttgggaggccaagatgggtggatcatgaggtcaggagatcaagattatcctggccaacatggcaaaaccccatgtctactaaaaatacaaaaattagccgggcatggtgggatgtgcctgtggtcccagctactcaggaggctgaggcaggagaatcgcttgaacccgggaggcggaggttgcagtgagctgagatcgcgccactgcactccagcctgggcaacagagcaagaccccatctcaaaaaaacaacaacaacaacaacaacaacaaaaatatatatatatatatgtgaagagactaaaaatagctcaataacttacagctttttcaaaaactcatgatttttcttaaccatctctttcaaacatggttacttagtactacaaaataacaactggttctattttcagcctctttcaaaccactaatcttaaatttactttcaaattaaaaagaaacacctggctgggtgaagtggctcacacctgtaatctcagccctttgggaggctgaagcaggcggatcaccagaggtcaggagttctagaggctagcctggccaacatggcaaaacctcacctctattaaaaatacaaaaatcactgggaggccgaggcaggcggatcgcctgtggtcaggagtttgacaccagcctggcaaacatggtgaaaccctgtctctactaaaaatacaaaaattagccgggcatggtgtcaggcacctgtaatcccagctacttgggaggctgaggcagaagaactgcttgaacccaggaggcggaagttgcagtgagccgagattgcgccattgcactccagcctgggtgacagagcgagactctgtctcaaaaaacaaaacaaaacaaaaatcagctgggaaaggtgacatgcgcctgtagtcccagctactcaggaggctgaggcacgagaatcgcctgaagctggaaggtggaggttgcagtgagctgagatcacaccactgcactccagcctaggcaacagaatgagactccatttcaaaaaaataaataactaaataaattttttaaaaatccacattataaattatgtattataaaagataaagaatgaaataactgttcagattaagggacactaaagaaacaaagcagtctaatgcaatccatggtccacggttttcttttgctatataatatatagtacactgtccaaacagctaatgtccttttatagcaaaagacagtccttttcactgggggaaaatctaaatggggtctgtcaatttgttgatgcattatattaacgttcatttctgggccgggcgtggtggctcacgcctgtaatcctggcactttgggaggccaaggcgggaggattgcctgagctcaggagttcgagaccagcctggcaacatggtgaaaccccgtctctactaaaatacaaaaaattagctgggcgtggcagcatgcacctgtagtccccagctactcaggaggctgaggcagaagaattgcttgaacctgggaggtggaggttgcagtgaccagagatggcgccactgcactccagcctaggcatcagagcgagactctgtctccaaaaaaaaaaacagtaagagttcatttctggatgctgaccattacactatactatgtaacagaatgtcctaatttttaggctttacccactgaagtatttagggataaagaacagcaatagcatatgtgcaacttactctacaatggctcagaataaaagaggaagagaaaaaaaaaagaataagtgcggtaaaatgttaacatttggaaaatctaggtaaaatgtatgagaattttttatattatttttgaagctttttgtaaggctaaaataatgtcctaattaaaagttaaaagaaaaaatgtaacagacaaaacccagcatattacaacataaagggtactggcttggtaattccaactacttggtagttccagcagcagcctccctgaggtgccaaaccaccccgtgcctccacctcattcaggggatgcggggactgcctgagcttacagcaatggctgtgagtgctctcaagtgaccacagatatctaggtggtggatgctcagtactaactggaatcttgataaagtaattcattgtgtaagctagttacatattataacaaaactaggaatacttgaatagtatttcttacctgttttctttccacaagtgcatttgttagctgatggcaaagcccagcaactagatacaataacaaaatattcaaaatataaatataaccacaagggcaaaatattttcaatggagaataaaatgttatttagcttacaagtgtctgttgcatatcgaatgtgctccccattacaagtgctgatgaagagctgaacctgtgagaatagcgtttcgaagtcaggaacactgggcatagaaaacttcacaaacctagaataaggagaaaagaatcaaattaccctgatagttcatgggataaaatacagaaacaatgtatgcaagaaatccatcctgcctccaatactctgtaaaattaaatgagcaacagtattttttagaattaagaactaggccaggacagtggctcatgcccgtaatccaagcactttgggaggctgaggcaggaggactgcttaaggccaggagtttgagaccagtctgagcaacatggtgagaccctgtctctactacaaaaaataaattagccaggcgtgggggtacatgcctgtagttgcagatacttgggaggctgaggctggaggatcacttgtgcctagaaggttgaggctgcagtgagctatgatcatgccactgcactccagcctgggtgacagagcaagatccagtctcaaaaaacaaataaataagaactagaatccatgagattttcctgacctggttattttgcacaatcactatacagaacggacacaaataagggttaagaaaaatatgtttaggcctggcgcagtggctcatgcctgtaatcccagcaccttgggaggccaaggcgggaggatcacctaaggtcgggagttcgagaccagcctgatcaacatggaaaaacctcgtctctactaaaaatacaaaaaaattagccgggcgtggtggtgcatgcatgcctgtaaccccagctactcgggaggctgaggaactgcttgaacccgggaggtggaggttgcagtgagctgagatggtgccactgcactccagcctgggcaacaagagcgagactgtctcaaaaaaaaaatctatatatatctatatatatatatatatacacacatacacacacatatgtttaataatatatattaaataataaacatgtatatattaaacatatatgttttatatatatatatatgtttaataaggaacaactttcaagatgaaaaattccactaaatgaagccaaataggctgggcatggtggctcaagcctgtaatcccagcactacggaaggccaaggtgggcagatgggcagatcacaaggtcaggagttcgagaccagcctagccaatatggtgaaaacccatgtctgctaaaaatacaaaaattggccaggcacggtggctcacgcctataatcccagcactttgggaggccaaggcgggtggatcacctgaggtcaggatttcaagaccagcctgaccaatcgggtgaaaccccatctctacaaaaaatagaaaaattagccgggcgtggtggcaggtgcctgtaatcccacctatttgggaggctgagacaggagaattgcttgaacccaggaggcagagtttgcagtgagctgagatcgtgccactgcactccagcccgggtgacggagtgagactcgtctcaaaaaaaaaaactcctttatgtttatacaaatcctgaaaatttgttttaaaaaatggccatctcaattgtggggactatagtttgcatttatctgaatacttttatccatgtaatccacaggaatgtccacattttctaaattaaaaagaagttcggaggagtactgccacagggcatggcagaatacattgaatgaaaatattggctgggcacagttgctcataatcccaacactttgggaggccaaggtcggaggatcatttgaggccaggagtttgagaccagcctaggcaacataatatggccctatctctgcaaagaataaaaatattagctgggtgtagtggtacatgcctatagtcctagcttctcaagatgctgaggtgggaggattgcttgagcccagaagttcaaggcttcagtaagctacaattaagccattgcactccagcctacatgacaaagtgagaccttttctcaaaaaaagaaaaagtatcaaagatccaaagcaacattgcttagaattcccttcaaacaaatttaagctatttaagaccaaattaaatagaccttattttaattggggttccttgtaaccgtgtacttgacagtagaattctttttctcttgatgttatagtattataaattgggatattgtggttgtcatgacatttgaaatgatataaataaactgagaagaaattgacttaaagtgagagtctggcttcacttacgctgggattcctgagacaaaggtatgtgtccggagcagagtttagagaagaagctttgtcagaatggaaggatctagagttatgctctgcagtatggtggccactagccatatgcagctatttaaattaaaattaaagattcaggtgcacttgccatgtttcaagtactcagtagccacatgtggtcacatgtccttgtcttagcacaggtttgtaacatttccaccactgcagatagttctattggacagtgctggtaaggatttctactgtctgtattttcttatttatatgaaagagcagatgctgggcacagtggctcacacctgtaatcctagcactttgggaggctctgtttgagaccagcctgggaaacatagcaagaccccatctctacagaaaaaaaaagtggccaggtatggtggcttatgcctgtaatcccaggactttgggaggctgagatgggcagattgcttgagctcaggagttcaagaccagcctgggaaacgtgatgaaaccctgtctttacaaaaaaacacaaaaattaggcgggcgtggtggtgtacacctgtggtcctggctactcaggaggctgaggttggaagatcacttgagtccatgagattgaagctgcagtgagctgtgctcatgccactgcactcctgactgggtgacagaacaagaccttgtccccccaaaagaaaaaaagttagctgagtgtggtggcacatgcctgtggtcccagctacccaggaggctaaagtgggaggactgcttgagcctgggaggtcgaggctacagtgagctatgcttgcaccactgcacttcagcctgagtgacatcaagaccctatctcaagaaagaacagagagcatgcatgttttatacacacataaactcacataaacatatatatcaggtgagtaatggacatgaatgcattttgaaggtataaggtgtttaccgttgtatatgttagataaggtatggaaagaaccctgagcttctggctgaggaccctggttttgaatctacatattcttccaattttgagttgtggggccctgagcttcatatttttatttataaactggcagtcgcaatgcctcactgacctattgtgaaccccagatgaaattgtttctgacatgtcttgataattacaaagtgtaaatacagatgtatggtgacattgttaagtcaaataatacagtatagatggaagcagataaaccaaaagatgtagtagaaattatgattagcttttcttttttttttttttgagacagagtctcacactctgtcacccagactggagtgcagtggcgttgtctcagctcactgcaacctccgcctcccaggttcaagccattctcctgcctcagcctcccgagtagctgggactacaggtgcatgccaccacacccggctaatttttgtatttttagtagagacagggtctcactatgttggccaggctggtcttgaactcctgaacttgtgatccacccgccttggcctcccaaagtgccgggattacagatgtaagccactgtgtctggcctaatttttcttgaaattacatttcaatcgtgcttttttttttttttaaagaatttgaaatttacttacaaccaatgccttaatagtgctaagtttacatgatttctcccctaaaacctatcaccagtgcctccttggagtgtttctcatggcagtctgagttacttgggaaggatcacctgagtcctccctcttctcaccactctactcctcttgtcctgcctatcagttgttctgtcagtgttattctcagatagaccacacagctggtggcagcatctttaacttaagctgctgcccacctccagccagcccatagctctcactcttggcccccttagtatgttctcaaagcaggaaaagcaacaactgattttttttttttttttgagagagtctccctctgtcgcccaggctggagtgcagtggtgcaatcttggctcactgcaacctctgccttccaggctcaagcaattctcatgcctcagccacctgagtagctgggactacaggcatgcgccaacacacccggctagtttttttattagtagagacagggtttcaccagttggccaggcaggtctggagctcctggccccaagtgatccacctgcctctgcctcccaaaatgttgggattagaggcgggagccactgtgcccagctgcaacaactgattttatttttttgagacagtctcgctctgtcacccaggctagagtacagtggcgcgaccttggctcactgcaacctctttatgcccggatacataaaagagtttttaaaaatgataaagttgaacaaaatataacaagcaattattagctggaatcaataaactgtaactgccataactttagttttgcaaaagagctcaatgttatttacaatggtttactttctacaccaaaaaataaataaataaataaaaataaagccagggctgggcgtggtggctcacgcctgtaatcccagcattttgggaggccaaggtgggcggaccaagaggtcaggagatcgagatcatcctggctaacatggtgaaaccctgtctctactaaaaatacaaaaattagctggggcgggtggcgagtgcctgtagtcccagctactcaagaggctgaggcaagagaatggagtgaacccgggaggcggagcttgcagtgtgccaagaatgtgccactgcactccagcctgggtgacagagcgaaactccatctcaaaaaatataaataaataaataaaaataaagccaggaagtgcacagtgttccattttaacaagcacagaactataaaagaagatgctccttacaaaacagcaaggacgcccaaggagtgttcttgtacatccagagccccgagcacagtgtccagatgggataagttcttcgcaaggagttccccactcttgttgatcagttcacaaagctgtgtcatttgccctggaaaacaggaacaacactattgcatttcagctacagcactaaccaaactgatggaactctaaccacaactttgtacttcagagcctgaagttcccaaaattgattcttaatctccttcacttcggatgaggatccagaaggaccagaggagtgaaacaacctgtccgtggtctcaaaacgaattagagattacactggacctcccacttctctctgaccctgaatgtttcacctttttctctattctgttttctagtctcccaagccagaaatgcacgttactattaacagctctctgcatccaaatgatttagttttacttccaaagtctctcagctccatttctttctctctcccctctctgccctaattcagatcctcatcattttttgtctggactacatcttttttttttttttaagatggagtttcactgtgtcgcccaggctggagtgcagtggcgcaatctcggttcactacaacctccgccctccaagttcaagcaattctcctgcctcagcctcccaaatagctgggattacaggcgcctgccactgcacctggctaatttttttgtatttttagtagagacgggggtttcaccttcttggccaggctggtcttgaactcctgacctcatgatccaccgcgcccagcctacatcataaatcttctaaatggtctgcctactgtgatctttctctcctccaacccgcactccatattagtactgtctgttctataaactgtgcattcaatcaagttattccaatgactttaagaagtgcaaacgcctcagcctgaactaaggcccttcaataactggtccctgctacctttccagccttatctcctgctacttcccctcacacacctactcttcgatcacagcaagctcagaaaatcaacattctatcttctctcctctttatgcttctacacatgctgttctctgtccttctcccccacatcctctgctacctgactgagcctcatccagcattcagcaatcaacttgtggcgtctctagaccctcatctcagctcccttccccatggctaagctgggtatctgccctctctgcctcgcatgggactgtagtggttaggtatttcagtaaactcaggtggagggattgtccctttctccagctctagaatacatcacctgcttagcagttcatcaagcagctacttgttgaattaatctcctaattgatctatttttcccctatactgcaatactatgtttgttttgttttgttttttgagacagggtctcattctgtcgctcaggctgcagtgcagtggtgtgatcacagctcaacgcagcctccatctcctgggctcaagcaatcctcccaccttagcctcccgagtagctggaactacaggtgtacgtcaccatgcccatcttattttttaagttttttgcagagacaggggtctcactatgttgcccagtctggtctctaactcctgggctcaagcaatcctcccaccttggcctcccaaagtgctgggattagaggcatgagccaccacactcagcctgcaatgctacattttaacaactaaggtacagaatctattaataattaggcctcagccgggtgctgtggctcacacctgtaatcccagcactttgggaggataaggtgggcagatctctcgaggtcaggagttcaagaccaggctggctcacacctgtaatcccagcactttgggaggataaggtgggcagatatctcgaggtcaggagttcaagaccaggctggccaacatggtgaaaccctgtctccactaaaaatacaaaaattagctgggtgtggtggcacacacctgtaatcccagctactcgggaggctgaggtgggagaatcctttaacctgggacaatccttgaacccgggagatggaggctgcagtgagctgagattgcgccactgtactccagcctgggcaacagagcaagactccgtttcgggggaaaaaaaaaattaggcctgaattggtacctttaagtagacccatcaattttgacaattactgtcatgacagataccatggtcacactctgtctttctggtaacagtgaggatatatttaagtccatgggcattaacctcaagtttccaacttctctatttctacagagcaactgcataatcttttccttactaaaagaatacaacatagtataatgcttaaaatacaagtgactatagctaggtacttttgataatttaacacttttcaatttgatacattttactgaaagcaaaggaaatgtatcattattatacatgcattacaaaacaagaataaaacagctgtgatcttattaggtgtcacctcttgagatcacacagatttaactgggaaataccaactcatcatcattgtattacagatctcactggtaggtatgaagtaacttctagttgaataatttgcctttgtaaaccattactctaaatatattaacaataatttgtaacacccagaaataagcattgcaatccattagttctctactagttaacaatcagtgcccagttgagactgaaataaaagctgggtcactatgaaatcaccagataattaattagtgcagggccaagggcagagtaaaaaaaaaaagtttaagtgtcacagagtgcatttgaaatcagtgtaaccagagatgtggccaataaaattcttttttttcttttttttttttttgagacggagtcttgctctgtcacccagactggagggcagtggcgcgatcttggctcactgcaagctccacctcccaggttcatgccattctcctgcctcagcctcccgagtagctgagattacaggcgcccgccaccatgcctggctaattttgcatttttagtagagacagggtttcaccatgttggccagggtggtcttgaactcctgacctcagatgatccgcccgcctcggcctcccaaagtgctggaattacaggagtgagccactgcgcctggcctgaaactcaaagatttcctatccagtgagtgtgaggcacagtagccgacagcaatgaaagttaccatatttatctctgtctagcagactgttcctatagcatcctataacctgaagaccacaacagccctagttctgttttgtaattaagaaaattggcccagggaaattaagtggttcacccaagaagtgaccgcgacaggatttcaacctgaagcttctaactacactacaccccaggaaggagaacactaagtatttgtcgaataaattaacaaaccagtggttcctttattcatagaaaaggcaagcctgtgccttccctgtgaacctcatttctattaataaaaaggaaaaagaggaagaattcttattaagtgcagctccatatcagaccatttgtcttacaccagtgaggtaaaagcacccctccatttttacaatggagatgcaaaagactcagagattaaaggttatttgtccaaggtcaagcagctcctagaactttgcaattaatgacggtaacaataatttgcagctatatttattgcaccccttatgacaggcactgttccaactgcttttacatggtttctctcattgaatcttcacaactctacataaactagggacttattttgcagacgaagaaactgaagcacgggatagttaaaagggccttcacagccagcatctaatcattcgaatttcaggtccagaattcggtacattcatacgcaatgaatgaaccaaacaacctggaaagtgcgagtaaaatcatcacaattctacccctagaaatggagtcctggccgggcgcagtggctcacgcctgtaatcctagcactttgggaggccgaggtgggcggatcacttcaggtgaggagttcgaaaccagcttggccaacatggtaaaaaccccatctctattaaaaatacgaaaaaattagccgcgtgggctggccgcggtggctcatgcctgtaatcccagcactttgggaggccgaggccagtggatcacctgagatcaaggttcgagaccagccaggccaacatggtgaaaccctgtctctactaaaaatacaaaaattagccgggcaggcgcctgtaatcccagctactcgggaggctgagacaggagaatcgcttgaacctcgaaggcgaaggttgaggtgagccgagaccgcgccactgcactccagcctgggagacagtgagactccgtctcaaaaaaaaaaaaagccgtgtgagctggcgggcgcctgtaatctcagctactcgggaggctgagacaggagaatcgcttgaagccgggaggctgaggttgcagtgagccgagatcgcgccactgcactccagcctcggctaaaaaaaaacaaagaagaagaaatggagtcctacgagcgagagcttccgcagcattctgtaggaccaaaataggcgcacaggttcccgagcgtgcgccgcctggcagcggaggagctggcagaggcgagccatagagccaagacacccagaacggactcgcctcccgcccgctcccggcggcctagtcagcaagctgcggatcggcggcaaagatgacatggcggtgcgccaatcaccgaaggcaagagagacagaaggaaccaatagtcgcccgagatggctcctggcggaagtcacgcccccaaactgtcaagcaaagcgcccggtggaaggggcccaggccggggggagggggctcccggcggcccgagggaggggaggccggccggcgaggacagcggagcgcgagggggctgcctacactcggccgcgctcgatcctgccctgatctaaacgccgcaaccccaagcccggccccggagaagagtctcaggactaaaagggctgttccagccgtccgtgctggcgcctggggatccaggccagttcccggtacccgcccatgcccagcccggcggcctagggcgttaccttgagctgagagctgtcggacactgttcacgaactgctccagggcagacgccatgttttcccccgggcggcccgagcggcgaaggcagcacgcgcgggaaaaggctgccgctctgggaggaggggccgcggcgatccacctgaggtcctcgcgagcggcgacgtcacttccgctggttcaagcaccgcgagactatacctagctgcccacccgttactgtttccatggaaacagcctgaattcgccgtagccggaaattagtgttccatagtcccctgcatctttattcactgcacttctgaaatccctccgcaggttaaatggggatagtgggcaaaagaaggaaggaaactcataattaagcaagtattttctggttctggattttgctagagaggccctgcggttttccacctggacagatacttcaatgaagcacaacttcgttgccacgtctcccgtgaggttttccccgtgatattagactctggagccaagcagcctgggttcaactgccttttctaccacttagtagctgtgtgacgttgagcgggtcacttgactgtcgtgtgcattgttttccccatctgtaaaatcttagtgtccttaaccacgtaaaacacttaggacagtgcataggacgtagggagaactatagttattcattcaaggtgtacgttgaatgaatcgatcccttccctgcaaaaaataaataaataagtaacaccacacacagaaagtgaattgatttttcccatctgggattgatgtctccctcctccgcttgtcgcctaaagcactttgttcttctcatgttgcacttctactctgttacagaaatgtgtctctatagtccatgtgatatctgtaaaccaaaaataaaagtctaagccccccaactgactggtggaccctatctgaagccaaggacattccaatttatcctgaaaaactagttcaggccatgatgggaagtggtagtcagacatgcctcacaaacatcaacacagagaccttaagactggtagactcaagactgataagaaatatttacaatctattctgtctgaatagcaggctacctggaagcctcatctgcatgataaaaccttggtctccacaaccccttataatcataacccagatatttctttctatttacttccaggtctttagataataactctttcaaccaattaccaatcaaaaaatctttaagtctacctataaggtagaagccccccactgccccgagttagcccgtctttccgatcctaaccaacgtacatcttacatgtattgatcgatgactcatgtctccctaaaatgtataaaaccaaactgtacccgcaccttgggcacatgtcctgaggagctcctgaggccgtgttatcatcgcatccttcaccttggcaatataaactttctcgattgagactggtctcagatacttttggtttacggatccattgcttctaactggcatggagttccttaaggtcaagcatttctcttactaaccttggttcccctttagggcccagcataggatttgctgcatagtagggactgagaaaataaacatgcattttaaaattttatccaacatatgtttactgacacttacaatgtgttgtaccaggcactagaaatacagtggtagtaaaaacagtcttggggcctggtgcagtctctcacgcttgtaatccagcactttgggagactgaagcaagtggatcacttgaggtcaggggttggacaccagcctggccaacatggtgaaaagccatctctactaaaaatactacaaaaattagctgggcttggtgatgggtacctgtagtcccaactactcgggaggctgagatgggaaaacctcttgaacccgggaagtggaggttgcagtgagccgagatggcaccactgcactccagcatgggcgacagagcaagaatctgactcaaacaaaacaaaacaaaacaaaacagtttcggtccttctctcctgcagacaacacatgaagaccctagataaaaggagttagtggtctgaaggaatggaacatggttctataaaatcatgtcacagaggagattgacctggcttgggagaaacagggaaggctttcttgaggaaatggcataaactgagcaacgaagaaagaggaagagttaataagataagggggaaggaatatttctgagtgagaggacagtatggtgctaagaccctgcaagtgaaaggagcatgctagttgagaatgaagaactgaaagaatgtccttgtggttggaggggagtagtttgtaaggtggacaggggccaggtcatgtaagctgtgttaaaggtactggactttttcctgagaagattgggaggactggagagttttatgcaagcggtggcaggatcaaatttgcgttttaggaccgggcgtggtggctcacgcctgtaatcccagcactttgagaggctgaggtgggtggatcacgaggtcaggagttcaagagcagcctggccagaaagatgaaatcctgtctctagtaaaaatacaaaaaatagccgggtgtggtggcgtgtgcttgtaatcccagctactcaggagctgaggcaggagaatcgcttgaaccagggaggtggaggttgcagtgagctgagatcaggccactgcactccagactggacaataaaaagagactcaacttcaaaaaacaaaacaacaacaacaaaaattgcattttaaaaagatttgtctggcttcacatggataacttgggagacaggaagctattgcaatagtcaacataaaatagaatagtaataattatactttaaataattataccttgaatgctaatagttttactcttaccaggagttcgagaccagcctagacaacacagcgtgactttgtctctacaaaaaaaattttaaaaactagctggttgtggtggtgcatgcctattgtctcagctactctggaggcagaggtgggaggaccacttaagcccaggaatttaaggctgcaatgagctatgatctcgccactgcaccccagcctgggtgacagagtaagaccctgtttctttcaaataaatagtaataataatagttctttcgaaagtgtagataaattcaccaggataaattggtgaacttgagacatgtttagatgaatgactgtagcacttgtactctaagatggaaatgctcctgaatgttctatggaagcaattggtccttaatctttgatcatttgcaacacacaagacagacattttgacttatgggacacatttccatggatatacatggattttggtgaaagccaaaaatgttgaagataagtaaagcactacaataattcaaagtagccacagctactaataatactttgattgtttatttattattgcctatttaggttgtggcagctgctctcaaactgtgactccaccaatcagcagcgtcagcgtcatttgggatcttcttggaaatgcacattcttggaccccactgtagacttcctatatcaagagctctgaaactgggcacggaccctcacgcctatataaaaattagccaggcggtagtggtgcacacctgtaatcccagctacttgggagtctgaggcaggagaatcgcttgagcctgggaggtgggggttgtggtgagctgaaatcatgccactgcgctccagtctcggtgagagagtgagaccctgtctcgaaaaaaaaaaaacggtgatttccagaaatctgagcttaacaagcctgcaggtaattctgatggtgctaaattctgagagcatctggaccgtggcctccagatgagccagcatgcaaataacatttcaaaacagctaaaagctaaattcaaaacagctaaattccacccttctctttcctctcaaaaacaaatgactgaaagagacgtgattatagggataaacctgaatatattctaacttgttttttttttttttttttttttttttgagacggagtctcactctttcgcccaggctggactgcagtggcgctatcttggctcactgcaagctctgcctcccgggttcacgccatcctgctgcctcagcctcccaagtagctgggactacaggcgcctgccaccacactcgactaattttttgtatttttattagagacggggtttcaccgtgttagccaggatggtctcgatctcctgacctcatgatctgcctgcctcggcctcccaaagtgctgggattacaggcgtgagccaccgtgcccggccttgttttgtttttttatacagagtctcgctgtcacccaggctggagtgcagtggagtgatcttggctcatctcaatctctaccttccaggttcaagtgattctcctgcctcagcctcccaagtagctgggattacaggtgtgtgccaccatgcctggctaatttttgtatttttagtagagatggggtttcaccatgttggccaggctggtctcaaactcctgagctcaggtgatccgcccacctcggcctcccaaagtgctggaattacagggatgagccactgtgcctggcctctaactcgtattttttttttcttttgagatggagtctcgttctgtcgcccaggctggagtgcagtggcgcaatctgggctcactgcaagctccgcctcctgggttcatgtcattctcctgcctcagcctcccgagtagctgggactacaggtcccccctaccatgcctggctaatttttttttttgtatttttagtagagacggggtttcactgtgttagataagatggtctcgatctcctgacctcgtgatccacctgcctcagcctcccaaagtgctggtattacaggcgtaagccaccgggcccagccctctcacctgtagttttttttaagccagaattttgtaaaatctggcaattacttgagaatgcctcacaaggaaggatggctcagcagtgggtggatatgatacatttaatcttttgttcttttattctttgaacacacatttactttgtatcaaatatgtgtcaaggctttgccagatgctgggaatatgtctgtgaacaagacagaatgtcccgggtcacatgaagttctggtttggagagtaaaacaataagcaagcaaatacataatttggatagtaatatgtgttatgaagaaaataaagcatggcgatgggggtataggaaggtcaggaaatgcttctttgagccctcaaggatgagaaagagccagttaagagagatgtggggccagagttggagacagagggatatgcatggtgggcaaaggtcttaaaatccaaacaagcttggtgtgtttcaggaaaagaaaaaaatgccagtgcagctagaatatagggagtgaggaggatcctggtatgtctcccttgagaaatgcttgtctatagcaatctcagatttgtccagattttcaaatgcaaaacattttcggattcagtaatgtctacaaattttttcaagtgataacttgtaaaaaaggaatagtagatagcacttggggaggggcaggaacagtgtcaggcactgttgtaaacaccttccacattctccatttctatttatttatttatttattttgagatggagtcttgctctgtcacccaggctggagtgcagtggcacgatcttggctcactgcaacctccacctccctggttcaagcaattcccctgcctcagcctcctaagtagctgggattacaggcacacaccaccatgcctggctaatttctttttttatttttagtagagacggggtttcaccatgttggccagactggtctcaaactcctgactgcagtcagtctgcccacctcggcctcccaaagtgctgggattacaggtgtgagtcaccatgcccagccaatttttttttttttttttttttttttttttgagacggaggcttgttctgtcgcccaggctggagtgcagtggcgcgatctcggctcactgcaagctccgcctcttgggttcacgccattctcctgcctcagcctcccgagtagttgggactacaggcgcccgccaccaagcccggctaattttttttgcatttttagtagaaacggggtttcaccgtgttagccaggatggtctcgatctcctgacctcgtgatccgcccgccttggacttcccaaagtgctgggattacaggcgtgagccactgcgcctagctgcccagccaatttttgtatttttagtagagacagagttttgccattttggccaggctggtctcaaactcctggcctcaagtgatctgcctgcctccgcctcccaaagtgctgggattacaggtgtgaattaccgtgcctggctctagagcagtttgtaggccttgtctccacaataatccttccaggcaggtgctattgtagaatcctccaggcttttcacaaatattccatttattttcctttcacacccttagaattttgttatcactatgtgactttatttggccactgaaacacaagtagaagtggcatgtttgacttttgggtgggagctttaagtgtcagggcaccaggataggatgggcaagccaccaaccacccttctgaacccacactggaaatgtgtatgtgtgtctgtttgtgtatatatatgtgttttattttatatatatttgtgtatatatatacatgttttattctatatatatatttgttttattttatatgtatatatataaagtaaaacaaattacccccaaacatagaagcttaacattttttatttctcagttattatgtcacaatttctgtgtttcaggaattctgccatggcttagctggctgcctctccctcaaggtctcacacaagacagcaattgggtattatctagggctgtggtctcatcagaaagctcactggaaatagtctgtttccaagttcatttacatggtcgctggaatgattcagctactcataggctgcttgactgaggacctcagttgcttgctggctattggccaggggccttgctcagttgcttgccacatgggcttctccataaaggagctcagaacacggcagatggattctcagagaaagagaaaataggagaggggaggagtgggggagggggagggggaggaggatgctgaaggggatgggaaagggaagagaagtaatgctaaagtcataggctttttgtaacctaatcttggaattaatgtcccatcccttttgccatagtgtatccattagaagtgagttgctaggtgtagctgatactcaagagcagggatgttccaacagcgtgtcaggaggcagggtttattgggagtcattttatcttattttttgttttctttgtttgtttatttatttatttatttttgagatggtgtctcgctctgtcacccaggctggagtgcagtggcacaatctcggctcactgtaacctccacctcccgggttcaaatgattctcctgccttagcttcctgagtagctgggactacaggtgcatgccaccctgcctggctaattttttttttttttttgtatttttagtagagacggggtttcaccatattagctaggatggtctcgatcgcctgacctcataatccgcccacctcggcctcccaaagtgctgggattacaggcgtgagccaccatatttatttacagagtttttgcttttgttgcccaggctggagtgcgatggagcgatctcggctcaccgcaacctctgcctcccaggttcaagcgattctcttgtctcagcctcccgagtatctgggattacaggcatgcgccaccactcccggctaattttgtatttttagtagagatggggtttctccatgttggtcaggctggtctcgaactcctgatctcaggtgatctgcccgccttggcctcccaaagtgccaggattacaggcatgagcccagctatttctttattttgagactgagtcttgctctatcacccaggctggagtgcagtggcacaatcttggctcactgcaacctctgcctcccaggttcaagcgattctgggagccattttagaggccgcctaccacaatgagtaggaaataaaccattgttaaggcactgagattttggcattggtattgcaacataacctagcctgtcatctgacacaatgtttatctcccatccttcagaaactgatgctcagaaagattaagggatttggccaaagatacacagccaggtactggcagcactaggattaaaacttatatctgtctgacttcaggccctgagttttttttgtttgtttgtttgttcgttttagacatagtctcactctgtcgcccaggctggagtgctgtggcaccatctcagctcatgagcagactgttcttgaacacctgacctcaagtgatgcacccacctcagcctcccaaagtgctgggattacagatgtgagccaccctgcctggcctccaggtcctgagcttttattcactatatgtattgggcgactaggaaacatgaggataggaaaagtattcaatttcagtccatgggacagtagcaacccttcatagcagctgttgataaaacgtgacacattttgatgtggtagggcctattgactgtgtggggtgagaggacgacagacaaggacgcaccccacaatcttgtaatcatttcctacaatacagccacattcccagatatattcataatcattcttctgttagcttagcaggtccatgtttccatccacagccacgtgcggaatctgcttcttgagaggatggatacattccagcgacaatgtgtgtgaagccatttgtcaaccccttcctatgactgttgagtccctcaaggccagagagactgcaacttacccaaggtcacacagcaaccagtggcagaggtaggactacattgccagcgttcccatccaaacctcttttcatgacagcatgtggcaaccaagcaggtatccacatccttcgtaggctaacaacactggtgcatccatatgagcagcacattacccgcagctgggaggccaagcaagagcccttttccctattgtctggaggatctgctatcctttcctgccacttccacctttttttttttttttttttttgagagtctcgctctgtctcccaggctggagtgcagtggcacgatctcggctcactgcaatgtctgtctcctgagttcaagtgattcttctgcctcagcctactgagtagctgggattataggcataagccactacacccggctaatttttgtatttttagtagagacgtggttttaccatattggtcaggctgctctcaaactcctgaccttgtgatccacctgcctctgcctcccaaattgctgggattacaggcgtgagctaccatgcccggccacttctacctttaagatatgtgaagcctctgattccttgcacccacgcacaacttccattctagcctccatctcaacccctcggagatctggactgtactacccaggattctcagttgcaagtggcagaaagcacaatttagactggtttaattacaaggcgaatttaccagcccatgttactggcaagcgactacagcttcaggaaaagatggatttggcaatgtagcaatgtgaacactgtctcaatttcacttgtcttttttctttccgtttcttggataaaacttttgaggtttgtttgtttgtttgtttgtttgcttggtttttagaaacagagtctcactctgctgcctgggctggagtgctgtggcaccatcagggctcactacagcctcgacttcctcagacttccaagtatctagtgctacaggcacacaccattaggctggctaattaaaaaaaaaatttcttttgtagaggtggggtctcctgtgttgcccaggctggtctcaaactcctggactcaagcaatgctcccacctcagcctcccgaagtgctagaattacaggaatgagctaccacacctggctgaatcctgtttttattttatcattttattttttaacttttttttttttcagacggagtctcgctctgttgcccaggctggagtacagtggcgcgatctcggctcactacagcctctgcctcctgggttccagtgattctcctgcctcagcctcctgggtagtggtattacgggtatgcaccaccatgaccagctaatttttgtatttttggtagagacaggtttcaccatgttggccaggctggtctttgactcctgacctcaggtgattcgcacgcctcggcctcctaaagtgagccactgcgctgggcctgaattctgtttttaaaatgaggtataattgaccaacagaaaatgcatacatttaaagtttgatagaaatttggtagattgttggtaaaatgtgatacattttgacttatgtacacactgttaaaccatcttctcaatcaaggtagtgaatacatccatcactcctcaaaggttcccccagcccctttgcaaatacctctcatcccccacatcccccatctgctttcagtcactatagattagttaacattttctagaaatgtaaataaattgaatcatattgtagatattcttttttatctggtttatttcattcattataattaatttaagactcatctatattcttcatttgtccttagtttgtttctttttcattttctttagagacagggtcttgctctgtcacccaggctggagtgcagtggcatgatcatagctcactacaaccttcaactcctgggctcaagcactcctcctgcctcaacctcccaaaatgctgtgctgagatcacaagtgtgagccactgcgcctgttcctttttttttttttttttttttttttgagatggagtctcactctgtcactcaggctggagtgtagtggtgcaatcttggctcactgcaacctccgcctcccgggttcaagtgattctcctgcctcagcctcccgagtagctgggattagaggtacctgccactatgcccagctaattttttgtatttttagtagagatgaggtttcaccatgttggccaggctggtctcgaactccaagaccttgtgatttgcccgccttggcctcccaaagtgctgggagccactgcacccaggcgtgagcacaggcgtgagccactgcacctggccctccttttttttgagacagagtctcactctttcacccaggctggagtgcagtggtgcaatctcggctcacggcaacctctgccttccaggttcaagcaattctcctgcctcagcctcccaagtagttgagattacaggcacctgccactatgcctggctgatttttgcatttttagtaggagggggggtttcaccatgttggccagtctggtctcgaactcctgacctcaaatgatccacccacctcggcctcccaaagtgctaagattacaagcatgagccaccacacccggccgcctgttcctttttattgttaaatagtattgtattatatggatgtatcacaatttgtttatcacatgttgatggacagttgggttgttctaccttttagctcttacaaaggaagcttctaaggatatttatgtacaagtctctatataaacatatcttctttcctcttgggtacacatccaggagtggaatagccagctcatacagtaggtatatgtttcaacttttttttttttttttttttttttttgagatggaatctcactctgttgcccaggctggagtgcagtagtgcaatctcggctcattgcaagctccgcctcccgggttcacaccattctcctgcctcagcctcctgagtagctgggattacaggcgtccaccactatgcccggctaattttttgtacttttagtagagacagggtttcactgtgttagccaagatggtctcaatctcctgacctcatgatcagcctgcctcggcctcccaaagtgctaggattacaggcgtgtgccaccgcacctggcctgtttcaactttttaagaaaccatccaaatgtgttctaaagtgtgtttgcacaattaatttctcatcccaccagctgtgtgtgagagttccagttcctccacatctttgccagcattttctatggtcagtctctttcattttaatcctcctagtaggtgtgaagtggtatcacactgcggttttaatttgcatttccttggactaatgatattgagcatcttttcatgtgcatatcggccatgtgtacatcttctttggtgaaatgtctgtttaaataactgccactactttaatgataccccaaaaatgttgatgcattgtatttctatttaatttattaatttattaatttattgaaatggagtctcactctgtgtcccaggctggagtgcagtggcgccatctcggctcactgcaaacactgcctcctgggctcaagcgattctcatgcctcagcctcctgagtagctgggattacaggagtgtgccaccatgcccagctaagttttgtatttttagtagagatgggggtctcatcatgttgtccaggctggtctcaaactcctgacctcaagtgatccacctgcctcggcctcccaaagttctgggttataggcatgagccaccgcaccctgccgtatttctttttttttttccgtatttctattttaattcaagtcaaatcaccttctaatgtttcttttaatttcttctttgatctatgggttatttagaagtatgttttagtttacaaatatttgggaatttttcagagacctttctgttattgatgcctaatttaattctattgagatcaaagaacatactctgtgtactctgaatcctttaaaatgtattgaggatatttttacagcccagagtatggcctgtctttttaaatgttttatatgcacgggaaaataatgtctattctgctgctgtatggatgtcatagaaatgtcaattaggtcaagtgggttaacagtgttctttgaggcttccatatccttacttgctttctgtctacttgttctattattaagataggaatattaatttctttttttgagacagagtcttgccctgttgcccaggcggcagtgcagtggcatgatctcggttcacagcaacctctgcctcccaggctcaagtgattctcctgcctcagcctcctgagtagctgggattataggtatgcgccaccatgcccagctaatttttgtatttttagtagagatggggtttgccatgttggccagattgatctcaaactcctgacctcacgtgatctgcccacctcggcctcccaaaggcctgctgggataacaggtgtgagctaccgcacccagctggaatattaaaatatttgacagtaattgtgaatttgcctatttccctttgcagttttatatattataaaacggtgtttccttttattctacttttatagtcattttaaatatattattcacataacaaaattcactatgttaaagtgtgagtatactatatacatccatataatacaatactacttaaatttaaatatataattcacgtaacacaattcacccatgttaaagctgtgttgcacaaccatcaccatttaattccagagcatttatatcacccaccaaagaaacagtacacttattagctctcctctcccctccccttccctccccttctcttttttcttttttcttttctttttttttttttttttgagatggagtctcactctgttgcgcaggctggagtgcagtggcactatcttggctcactgcaacctctgcctcccgggttcatgccattctcctgcctcagcctcccgagcagctgggactacaggcacccaccaccacacccggctaattttttgtatttttagtagagatggggtttcaccgtgttagccaggatggtctcaatctcctgacctcgtgatccacctgcctcggcctcccaaagtgctgggactacaggcatgagtccccgcgcccggcctcattctcttttttctttgaggcggggcctcactctgttgcccaggctggagtgcagtaatacagtcatggctcatggcagcctcgacctcctcagcctctcaagtagctgggaccacaggtgtgcaccaccacacctggctagtttttgtatttctgtacagatggggtttcaccatgttgcccaggctcttagcaattagtttcaatttcacccttcccacaacacctggcaactactaatctactttctgcctctatagatttgcctgtattctggacatttcatataaacagaatcttttaagacctgaccttttgtaactggcttctttcacttagcaaaacatcttcaaggtccacccatgttgtggcatgtgccagaatttccttccttttcaaggtcatagtacgtatataccactttgtatttatccattcatctatcagtggatacttggcttgcttgcacctttttttttgtttgtttgtttgtttttgagacagggtcttgctctgttacccaggctggagtgcagtggggcaataatagctcactgcagcctctaattcttgggttcaagtgactctcccacctcagcctcccaagtagctgggactacaggtgtgcaccaccacacttggctaattaaattttttttttttttttttgagatggagtctttgtcacccaggctggagtgcagtggcaggatctcggctcactgcaagctccgcctgccgggttcatgccattctcctgcctcagcctcctgagtagctgggactacaggtgcccaccaccacgcctggctaattttgtttttgtatttttagtagagacggggtttcaccgtgttagccaggatggtctcgctctcctgacctcgtgatccgcccgcctcggtctcccaaagtgctgggattaaaggcatgaaacactgtgcccaggctttttttttttttttttttttttttttttttttaaagacagagtctcctctgtcgcccaggctggagtgcagtggcatgatctcagctcactgcaaccgccgtctcccgggttcaagcgattctcctgcctcagcccccggagtagctgggactacaggcatccgtcaccatgcccggctaatatttgtatttttttagtaaagatggggtttcaccatattgcccaggctgctcttaaactcctgagctcaggtgatctgcctgtctccgcctcccaaagtgctgggattacaggcatgagccaccaagctcggccaaaaaaatcttttttttagaaatgagttcttactatgtgatttctttttcttatgatatctttctctggttcggtgtcagagtaaattggcctcacaggatgtgttgagacatgttcccttctgttcgattttttgggagagttgtgaaggattgctattatttcttcttaaatatttggtacaattcaccagtgaagccatctggtcttagacatttattttgggaaagttttttaaaattactcattcaatcttctttaatggttatatgcatattcatattttctttttctttttattcttgaactagaaaaagaaaatgtgaatatgagtcatgggctttggcagtttgtatctttctagtaatttgttcatttcatctaagttatataatttttggcatacaattgctcataatattttcatatatatatttttctttgtttctctaaggtgggtagggatgttcctctttcattcctgattttagtaatttgagtcctctctttttgtttcctagtaagtctaactaaaggtttatcaatttgtgttggtcttttcaaagaaccagcttctgctttccttgatttttctagtctctattgcctgtatttctgctctaatctttgttattctttacttttgcttgctttggatttggttgtttctagattcttcaagtgaaaggttactaatttgaggtccttatttaatataggcatttacaactataagtttcctcctaagtgctgctttggctatattgtgtaaatatggggatgatgttttttcatttacatttttctcccaatgattttcttatttctcttgtggctgctcctttgacccattattatttaggagtatgtaattaaaattccacatattagtgaattccccaaagtttcctctgttactgctctccagtgtaagcaatgtgttggactatttactttgtatgacttcagttctttaaaatgtatagaggttggttttatgactagcatatggcctatcctggaaaatgtcccatatgtgcttgagaagaacatgtattctgctgttgttcggtggagcgttgttctatagatgtggatgtctattatgtttagttggtttagtattatttgtgttttttatgtccttgtggcctagttgttctaccgcttattgaaggaaggtattgaagtctattattattggtattattattaaaaacagggtctcactctgtcactcaggctggaaggcagtggcatgatcatacttctctatggcctcaaatttctgggctcaagtaatcctcccacctcagacccctgagtagctaggactacagacatacactactaagcctggctaatttctaactgttattttatttattttttcattgttttttgagacagagtctctctctgttgcccaagctgctggagtgcagtggcgcaatctcggctcactgcaacctcctaggttcaagtgattctcctgcctcagcccctggagtagctgggattacaggtgcccaccaccatcccagctaattcttgtatttttttagcagagacagggtttcactatgatggccaagctagtctcaaactcctgacctcaggtgattcacctgcctcggcctcccaaagtgctgggattacaggtgtgagccaccacacctggcctaattatttatttatttatttatttttgagatggagtctcactctgtcgccaggctggagctcatcttgcaaaactgaaactctacccattaaataactttccatttcctctcccctcatctcctgggacccacaattctactttctagttctataacttcgactactctaaatacctcatctaagactcatatagtatttgtcattttgtgagtaatttcacttagcataatatcctcgaggttcatccatgttgtaccatgtgtcagaatttcatttctattttaagtctaaataacattccattatgtatgtcatattttgtttatctatttatccattcatagacactgggttgcttctaattcttggctatggtgcaaaatgctggtatgaacatgagtatagaaatatctcttaagactctgctttcaattctttttggtatatacccagaagtggaatttctagatcaaatggtaattctatgtttaattatttgaggaaccatcatgctgtttttcccagttgctgtaccatatacattcccactaagaatgcataaaggttttaatttcttcacatcctcactaatgcttgttattttctgttttgttttggttttttataatagccatcctaatgggtatgcagtagtatctcattgtggttttgatttgcatttccctagttaatagtgatgttgagtttctctccatgtgcttattggccatctgtatgtctttggagaagtgcctattcaaatctgttgctcattttttttttttgagatggggtctcactctgttgcccaggctggagtgcagtagtgcaaactcggctcactgcaacatccactgcccgggttcaggcaattctcctgcctcagcctcccaagtagctgggattacaggtgcgcaccaccatgcccaactaatttttgtatttttagtagagatggggtttcaccatcttggccaggctggtctcaaactccctacctcaggtgatccacctgccttggcctcccaaagtgctgggattacaggtgtgagccactgtgcccggccttgttgctcatttttaatgtaatctgcattgtttctgacaaaaagtctgctgtcatccttttctttttttttttttttgagacggagtctcactctgtcacccatgctggagtgcagcggcgcgatcacggctcactgaaagctcagcctcctgggttcacaccattctcctgcctcagcctcccgagtagctgggactacaggcgcccaccaccacgctgggctaattttttgtatttttagtagagacggggtttcaccgtgttagccaggatggtctcgatctcctgaccttgtgatccgcccaccttggcctcccaaagtgctgggatttcaagcatgagccaccgtgcctggcccatccttttctttttttgttcctttgtatataatgtgtctttatttttctggatgcttttaagattctgtgtatttctggctttgagcaatttgattatgatgtgtcttagttttcccaaacaaaataatttaaatttaaaaaatactgcctgggtgcagtggctcatgcctgtaatcccagcactttgggaggccgaggcaggcagatcacctgaagtcgggagttcgagaccagcctgatcaacatggagaaaccccgtttctactaaagaaaatacaaaattagccgggcatggtggtgcatgcctgtaatcccagctactcaggaggctgaggcaggagaatcacttgaacctggaatgtggaggttgcggtgagctgagatcacgccattgcactcactccagtctgggcaacgacagcaaaactccgtctcaaaaaacaaaaacaaaacaaaacaaaccaaaaagtgaaatatttaggtataaatcaacaaaacacatgcaggatctgtatactgaaaactacaaaacattggtgtaagaagccaaagaaaagagggatatactgtgttcatggattggaatagtcaacataattaagaagtcaagtcactccgaattgatctacagatttagtgcacttccaaccaaaccaaggaagttttgtgtgtgtgtgtgtgtgtgtgtgtgtgtgtgtgtgtgtgtgtgtagatatagacaagctcattctaaaatttatatggaaagtcaatgaaactagaatagttaaaacaattttgaaaaagaagttgtgggactcacaatacctaatattaagacttactatgaagctaaagtaatcaagacagtttgctaatagcaaagggagaaacatacagatcaatggaacagaataggagagtctagaaatagatccacagaaataggatggatggagtttgtttttgagacggagtttcactcttgttgcccaggctcgagtgcaatggagcgatctctgctcactgcaacctccgtctcccgggttcaagcgattctcctgcctcagcctcccgagtagctgggattacacgcatgcgccaccatgcccgggtaattttgtatttttagtagagacagggtttctccatgttggtcaggctggtctcgaactcccgacctcaggtgatccgcccgcctcggcctcccaaatcctgggattacaggcgtgagccaccgtgcgcggcctgatggatggagtttttaaaaaactgcaacggcaacccaatatagaaggcacagcaggagccccgccccttctgagttggcggggcgggagttccccagatgccgctgcagttgccctgctgcggctctggcccagcatctctgtgctcttgggaacctgtgaaggctccactgcccctcgcaggctcggaagtgcctgctcctgctgcctggcttctccctgctgttggtgcctgcttcaatctcggagcaaagtcgggccgagctagggcgccgtcacagcccagccgggagtgcacacgctcagggcagcactgacacgccagccccctgcctccttggccccctccggacttgggtgccaacaagcatcggagaacggccgaggggggcatgaggacagcctggtgttggcctgcaggtaccccttggcatgaacagcctgggcgccatgaacagcagcaggaatgcagacagctcctcggtggaagggggcgggtccctggtgaagccccaccttcaatcctggaagggcctgaagcctgggggccaggtcaccagtcccagtaccagagcggggaacttgtggtgcttttccccaggcctgctcatggccacctatggccgcccatggaccaatcagcactcacttcttcccctctgaggtccataaaaaaccctggactcagccagactcaaagagaggacgggtagatggggagaaaaccagctgcagagaggaactaccctttctgctgagagctggacacttgttgggatgaactgcctaccagagaggagctaccctctctgctgaaagctgaacacttgtggggaaaccctggctatggagaggagctgcccactgcaggtctcttctgaagtattctgttgctcaataaagctcctcttcgtcttgctcactctccacttgtctgcctaccccattcttcctggatgcaggacaagaactcgggacctgccaaatggtggggctaaaagagctgtaacacaggctgggtgcagtggctcacgcctttaatcccagcactttgggaggccgaggggggtggggcggatcacctgaggtcaggagtttgaggccagcctggccaacatggtgaaaccctgtctctactaaaaatacaaaaatcggccgggtgcggtggctcacacctgtaaccccggcactttgggaggccgaggcgggcagatcacaaggtcaggagttggagatcagcctggctaacatagtgaaaccctgtctctactaaaaatgcaaaaaagctgggtgtggtggtgggcgcctgtaatcccagccacttgggaggctgaggcaggggaatcgcttgaacctgggaggtggaggttgcagtgagccgagatcctgccactgcactccagcctgggcaacaagagcaagactccctatcaagaaaaaaaaaaaaaaaagggagagaatgtggtacatatataccatagaatacttcacagtcataaaaaaagaataagatcatgtcttttgcagccatatggatggagctggagacaattatcctaagcaaacacaggaacagaaaattaaatacctcatgctctcacttaaaagcgggaactaaacattaagtaaacatggacgtaatgatggggacaacagacacggtgacctacttgagggtggagagtgggaggagggtgaggatggaaaaactacctatcaggaactacgcttattacctgggtaataataatctgtacactaaacccccaagacagtcaatttatataacaaatctgcacatgtatccctgtacttaaaagttgaaaagaggccgggcgcggtggctcacgcctgtaatcccagcactttgggaggctgaggtgggaggatcgtttgagcccaacataggaagactcctgtctcaaaaaaaaaaaaaaaaaaaaaaaaattaccagggtgtggtggcaggcccctgtggtcccagctactcaggaggcagaagcaggacgatcccttgggcccagaaactcaaggctgcagggaaccgagatcatgccactgcttccaccctgggtaacagagcaagaccccgtctccaaaaaaaaaaaaaaaaaaaagcaatacaggggtacttaatatttattcatatatttacctgagaatcatcagttttactaaggctgtatgatgttagcagatattggttctatcagtctctccgcagacatttgctgtaaataaagcagagaggctttcagagtgcaccctgtttttgttcctccatcctgttgtctggatccccttctaaaacgtaagttccaggatggcaggaactttgtctatttggttcacactcgacacagttagtgctcaaaaatgtctaacgacacaggcctgcttctcggtttgcactgctcctccatggtagtctgtgcagtgggagaaggcagcccgggcccagggtccacggagaagacgcaaatcgacagcgcgggagcgcggaccttctggaggcgcgcggcgcttaccgctgtccgtcctcgaagccccgccccggggctccgcctccgccggcgcgtgttcctttagggaccgcgcgcgccgcggcctcgctctggggccggtacttgcgcgcccgcaccccgcgctccccgccccgctccccgtcccgcgctccacgcgcgccccagcgttgggggcttctcctccgcggcgggaatgtctggccggctccggcagcacggcgcggcccaggtccccgcgcccacgacgggccagcgcgctgggccatgatccggctgggcggctggtgtgcgcggcggctctgcagcgcggcggttcccgcggggcggcgcggggcggcgggcgggctgggcctggcgggaggccgcgccctacgggtgctggtggacatggacggcgtgctggctgacttcgagggcggattcctcaggaagttccgcgcgcgctttcccgaccagcccttcatcgcgctggaggaccggcgcggcttctgggtgtcggagcagtacggccgcctgcggccagggctgagcgtgagcgtccccgccccgccccgcgccgggcctccttctcgccccgagccccagacaccgcccctgcgccggtgaccttggacggtcagcgccccagcctcggggtggccctctgatagaatagggtctgggggggactaggggccacagcgcaccgggaagatgcggccccgcgctcaggatctgttggctgccatccaaggtttctgaaaatgcgggagagtacaaagtgttaatatacctaactctgcatttaaagctgacttcaaaatttgtggcatatttggcctcaagtcgtttgttaaatttttagaaaaataaacgttataagttgtcctctttcaccccgaccgcagtcacattcccacttctttgtccccaggactttgatgggtgtctttacccatcttttttactgttgtccatgaaagcatagcttccaggggtatttgaggcccagagaggttgtgtgactttctgggggtcacacagtgagtcagtggtccaggtgaggtgggatccacctcatgtcttatccccttgcagagctggccttgctgaacacctgagctcaacccctaccatccgactcccgaggtgttctgtccaggatggatagaggggaaagatccaaggagggacgtttacacacagatcttggttggtaaatttgaagtattttgcaaaaggaacaggggattttggtatgcacaaaattaaagaggctgagtgttttttggcatcccttgattggccacctagggttgctgctggagggtttgataaagaggagaaggaagttacaagagcccgttttttagccacaagttcactgcatcctctcttttgttgggtagatattattatctctgttttccagatgaggaaacttgccccaagtcacatgctgctcaggggctcagtcaggactcaaacccaagtctgtctgcctcccaagcacagttagtgctccccactccacagtcctgttctctgtactactgtctctaacaagtgacatttcttctgacatcagaaagatgcctcatcagtaatgtggtttgttgagggacaggtgttaaaaaaggaaaccaagtaccgtttgtctccatcaacaccaggcacttcagaaggtgactttcacagagcccagtgtgctgagctcttctacagcggatgcctaatgataaactttaaactggagaaaatgccctggtactttctgcagcctcaggaataggctccagtgtgtggcgagtgttcatttataggcagcgctcggcatggggagtctggacaccatatatccgcccgggagtgtattaacgtggaaaccaagcccacccccaactccgaaaagtgcagcagcttttccagttctttgtgcaaatatgtaggctctgtacgtgtggggttactggtttccaagcacaaggcaaaggcacggggcagtaaggagggtgccttgggagtaatctgctggcttccactacttcccttcctgaggcacggcttgctgctgtggacatccctgggcctaccccaagctggcccagtatctgtggttaaaacaaccgcccccccccccccgcccccacacacgtggctccttatgtgtatgtaggcatttctacttttcaaaattctgctctgtctgtattccctttggtcttcacagtaccctatgtgggatgtgaggatcaaatgtgtttcagtaataagcacgcatttgcctagtccctgtggttcctgagagtgttgctggtatgctgtcagggcatcctccggccgtccatgtgacagggtggctgtctttctgtagtgtgcagaacagctggtagaggcacttcctgtactgcacacgtgggatttaggctcctgctcataggctgagatgtgtctcccctctggttgtcactttccccttgcctgaccctagaaaaggtgctgcattctggccctgcagcagaacaggggaaggagaaaggcagcgggggttggggagtggggaggagagggttggtgttgggggttcttctcccagctcagctgctgttttgctgtgtgacatcaggtggatctcttccccgttctgagcctcagttttctgacatgtaaaatgagggtctgcatttttgctttgcaactctaaaagcagcagaatcctttttttaaaaatgtacttattggcacctcaacatataaaaccgataaaagcagagctcttctggttaatgtggggaggatcctcgagctccctgaattgtccttttaccctgtctccccctcccccttgtccctcatggcaccttaaagatctctgagtccctccagttctcaagtttaaggactctactaccatggtaagagctggtccagcctcagtttccacaatgcttttggccactcgaatccagcctaacaagcacgcagttcctgatgattggcctcaggtcccagagagctccagcaggtgtaggagtccatgggcctgacacctttgctggtctctgctggatcccgacgaagtcaggtcctttctggaaaggggttcgaagtccacatactctccgcactacccccaggaagtacgtccttgggtgtgtgtttgggggagtgagaggaatgaagaaccactccccctatagcctggccatactccccaagatgagggcagtaaggtgctgaggaccctggaagtaacttgcttttctcaacttctcaggagaaggccatcagcatttgggagtcaaagaatttcttttttgaacttgagcctctgccaggggccgtggaagctgtcaaggagatggccagcctacaaaagtaagtttgtcctcccagccactcagtaagtttgtctgagcagccactgagccctgtacctccttcctgcttcttccctcctctgccttctcctttctctctccttggccctgcgcaaggctgcacttgcctcgtcattgctgagcctggggaaaaccaccaaatacaatgatctcggtttgtaggctgtgatgttttgatccaggaacttgaggaaatacccagtttaatttgatctggttccctgggtgttcaaagctcatttattcaatgcccggacgtggtggctcatgcctgtaatcccagcactttgggaggctgaggcgggcggatcacgtgaggtcgggagtttgagaccagcctgaccaacatggagaaaccccatctctactaaaaataaaaaagttagccgggcatggtggcacatgcctgtaatcccagctactcaggaggctgaggcaggagaaacgcttgaacccgggaggtggaggttgtggtgagccgagatcgcgccattgcactccagcctgggcaagaagagcgaaactccatctcaaagctcatttattcagcaaatatctcagaactgactgtgctagatactgcaggccgcagtgtttcagcaatgagcaaagtatagtccttgccctcatggagcttctagtccagacagagcagacattaaagaatcacaaaatggccgggcacggtggctcacgcctgtaatcccagcactttgagaggccgaggcaggtggatcacctgaggtcaggagttcgagaccagcctggccaagatgatgaaaccttatctcagccgggcgcggtggctcacgcctgtaatcctagcactttgggaggctgaggcaggtggattgcctgaggtcaggagttcgagaccagcctggccaacatgatgaaaccctgcctcagccaggtacggtggttcacgcctgtaatcctagcactttgggaggctgaggcaggtggattgcctgaactcaggagtttgagaccagcctgcgtagcatggtgaaaccccgtctctactaaaatataaaaacttagctgggcgtggcggcatgcacatgtagtcccagttacttgggaggctgaggcaggataattgtttgaacccaggaggcggaggttgcacggtgagccaagatcgcgccactacactctagcctaggcgacagagcgagattctgcctccaaaaaaaaaaagaaaccctgtctctactaaaaatacaaacaattagctgggcgtggtggtgggcgcctgtaatcccagctacttaggaggctgaagcaggagaatagcttgagcccaggaagtggaggttgcagtgagctgagattgctccattgcactctagcctgggcaacaagattgaaactctgtctcaaaaaaagaatcacaaagtgaagacacttgcagattgtccaaagagctgaaggaaaagaggttcagcgggaaacttcatttagaaaaagtgtttaaggaaagagaagtagtattgcttgagatatttctgttttgttctggtgaaatgagtagttttatggactgaagcccccactcagtgacctgttgacaattacagaggatgtgcttccctgagagatttttaaaaacagccttattgacatataataatgacataccagctgggcgccgtggctcatgcctacaatcccagcactttgggaggtcgaggcgggcggatcaagaggtcaggagttcgagaccagcctggccaacatggtgaaaccccatctctactaaaaatacaaaaattagctgggcgtgggggcgggtgcctgtaatcccagctactcgggaggctgaggcaggagaatctcttgaacctgggaggcggaggttgcagtgagccaagattgcaccattgcactccagcctgggcaacagagtgaaactctgtctcaaaaaaaaaaagagacataccgtgcagtccacccatttgaagtatataatccagtggttttacaaaaccatccacaaagttgtgcaaccatcatcatatccgcttcagagctttttcatcatccccaaaagaaaccctgtacccatcagcagtcacccccattcctgtgctccctgccagcccctggcaaccactaatctactttctgtctttaggaatttgcctattctggggatttcatataaatggcatcatataatatgtggtcttttgggtctggcttctttcatttagcacatgttttcaaggttcattcatgttgcagcatctatcaatacttactatttttatggctgaatgatattccagccattggatatgtatggatctaatgtatggactacatgtattgatccatttatcagttgatagatgtttgggcagttttcacttttgggctattgggaatagtgctgctatgaacattcgtgtaaatatttgtttgaatcttgttttcaattctttttctttctttcttttttttttttttgagacagggtcttgccctatctcaaaaaggctggagtgcagtggcatgatgatggcttactgcagcctttaccgcctggactcaaatgatcctcctgcgtcagcctctagagtcgctgtgaccacagatgcacactactacacccagctaatttttcattttttgtagaggtaggatctacctatgttgtctaggctggtctcaaactcctaggctcaagcagttctcgtgcctcagcctccaaaagtggtgggattacagatgttttcaattcttttgagaatatacctaggaatggaattgttaggccataggataattctgtgtttgacattttgaggaactgtcaaactattttccaaagcaattgtactattgcacatttcccactagcatcatatgaaggtttcagtttctccacatctttgtcaacacttgttaatttctgttttactttagccatccttgtgggtgtgaagtgattttgtgaattttgggttgcatttctctgatggctaatgatgctcaagcatcttttttttttttttttttttgagacagagtttttgagacagagttgctgaccttgggtcagcaatggcttcttcatatgacacaaaaatgcaagtgacaaaagagaaatacacaaaaattggactacgccaaaagtaaaaacttttgtggtttttgtttttttttttgagacggagtctcactcttttgcccaggctggagtgcagtggcacaatcttggctcactgcaacctctgcctcctgggttcatgccattctcctgcctcagcctcccgagtagctgggactacaggcacccaccaccacacctggctaattttttgtatttttagtagagacggggcttcaccatgttagccaggatggtcttgatctcctgacctcgtgatccaccctcctcagcctcccaaagtgctgggattacaggcgtgagccacctcgcccggcctaacttttgtgtttctaaggacaaaattaagaaattgaaatgaaagtctacagaatgagggaatatatttataaatcatgtatctgataagagacttgtatctagaatatataaagaactcttccaagttaacaatgaaaaaaagccaggcacagtggctcatgcctgtaatctcagcagaaagccaaggcaggaggatcacttgaggccagcagttcaagaccagctggggcaacatagtgagaccctgtctctacaaaaaatacaaaaatgtagtgttatacccaaaagtaagttatcctgtgcctgaccttgtccaaaagctaacagtaaaaaaagacaaaccaattgaaaacctcaacaaaggattgaatgaacatttctttaaagaaaatttagaatgtccaataagcacataaaaagatgcttgaggccaggtgtggtggcttaggcctgtaatctcagcacttggcaggccgaggcaggcagatcacttgagctcaggaatttgagcccagtctggccaacatggggagaccctgcctccactaaaaatacaacaaaaatagccaggcatagtggtgcgtgcctgtgatcccagctacttgggaggctgaagtgggaggatcacttgaacctcaggggggtggagagagtggggggagggggagggtttgcagtgagccaagttcacaccactgcactccagcctaggtgacaagagcgagaccctgtctaaaaagaaaaagattcggctgagcacagtggctcacgcctcttatcccagcactttgggaggccaaggcaggtggatcacctgaggtcaggagttcaagatcagcctggccaacatggtgaaaccccatctctactaaaaatacaaaaaatacaaagatttgcccctgtgttttctttaagagttttagttttgggccgggcgcggtggctcacgcttgtaatcccagcactttgggaggccgaggcgggtggatcatgaggtcaggagatcgagaccatcctggctaacacggtgaaaccctgtctctactgaaaatacaaaaataattagctgggtgtggtggtgggcgcctgtagtcccagctactcaggaggctgaggcaggagaatcgcgtgaacctgggaggcggagcttgcagtgagccaagattgcgccactggactccagcctgggccgacagagtgagactctgtctcaaaaaaaaaaaaagagttttagttttagctcttccatttaggcctatgatccattttgagttaatttttgtatatggtgtgaggtagggggtcaaacttcattcttttgcatgtagatatcttgttgtcccagtttcatttattgaaaagactacttttttcccactgtattgtattcacactcttgctgagaattaattgagcatcaatataaggatttatttctagacttagataacttttattggccacatttttgcttgaatttagcaacctgaatgacaaatgtaaggtatgatttggccttcattgtgtcatataaatgcctctaaaaattgtcaacttttaaagttctaatatgataaataggtgtcagagaaacacaaaatacagagtttgagttgaatcgtagaccttatttggtagtaatttatctttggatgtgagtccaagtcctgcagagtagtgaattttattctggtttatggtatgaacttgatgtatcgtgttcctgtagcaggagtctgagaggcaaagaatatgtgtacagcattcacacttaagctttcaaaaccctgctcgtggcctggatcagcatgtgctgacctgcagccacatgactgtgtcctggggagctgcagggcacagtggtttggagtggggttctggacattggctgcccaggctcacatcctcacttccccagaatctcattcccagatgtcaggcaagttattaaactttctgggtttcagtaaaatggagataaggagaaagtcctcagtatatgtgcctggcacatagcaggtgctcagcaaatgctagctgctgctgttgccgctctgtaagatttaataggcatatcgcaagaaaggcatccttaagccaccacggtatgggaaacaatggattagattggcttcttcaccatagtacttttcagagcttttaagtgcttgtgtgctttgtgacactgcattggggtagtaagggatgcagctttcttcaaaagtattctagcggccaggcacggtggctcacacctgtaatcccagcactttgggaggccaaggtgggcagatcacctgaggtcaggagttcgaggccagcctgaacaacatggagaaaccccgtctctactaaaaatacaaacaaattagccaggcatggtggtgcatgcctgtaatcccagctactcgggaggctgaggcaggagaattgcttgcacctgggaggtggaggctgcggtgagccaagattgcgccattgtactccagcctgggcaacaagagtgaaactccatctcaaaaaaaaaaaaaaaaaatgtattctagcctgggtggggtttggtagctcatgcctgtaatcccatcactttgggagactgaggcaggagaatcacctgagctcaggagtttgagaccagcctgggcaacacagcaagctcctgtctctactaaaaaaaaataataatagtaataaaaagaagccaggcatgctgacctgtccctatagtcctagctacttgggaagctgaggcaggaggatcacttgagcccaggagttcaaggctgcagtgagctatgatcacgccatgtactcctgcctgagcaacagagcaagaccccgtctcttaaaaaaagatattctaggccgggtgctggctcacacctgtaatcccagcactttgggaggctgaggcgggcggatcacctgaggtcaggagttcgagaccggcctgaccaacatggagaaaccctgtctctactaaaaataaaaaattagctgggtgtggtgggcgtggtggggcatgcctgtaatcccagctactcaggaggctgaggcaggagaatcgcttgaacccctggaggcagaggttgtggtgagctgagattgcgccattgcactccagcctgggtaaaaagagtgaaaatctgtctcaaaaaaaacaccaaaaaccaaaaaaggtattctagcctggaacattttttcatagcttctcgattaatacctttgcagaaattcccgtttgggaatgcaaatctagaccatacccagtggtcctttatctccatttggctcttaaattggtagaagattcctatggtcagtttgtgcccagtatctagacaaagcgaagggactcgtcagtaactgagtggataactgtgtatctggtgctgaagtgggcactgagtacaagagatgtgggcccagcagcagagaccaaggctgatcagtcaccctcatgactatttatccagcatctgctgcatgctcagcctcatcccaggggctgcggggacacaaataggtaagagagttcttaccttcaaagagttccctggtaaacagacattggaacatagatctcaaagtaatcgtggcgttggggctcaggcaggcaggcaggaactgctgctccccgggaggccacgccattgtgctgccatcttgaggaatgaaaaggaacctgccaggtagtgaagggcaaggggactccaggtaggaggggaacagttgagcagacgcccaggggactctcctgagatggcctttgtggcacgtcctgccctgttccagcagctctgcgcgtgagatagggcttccctgggcagagcctcaggttctgaggagcttggtttggaatatcttcaggggtgaccattctttttattgttcgggaatatatgaatatattctttttttttttgagatggagtcttgctctgtcgtccaggctggagtgcagtggtgcgatctcggctcactacaacctccgcctcccgggttcaagtgattctcctgcctcagcctctggagtacctgggattacgggcgcccgccaccacgcccggctaattttttgtatttttagtaaagacggggtttcaccacgttggtcaggctggtgtttaactcctgacctcaggtggtccacccacctcggcttcccaaagtgctaggattacaggcgtgagccatcgtgcccggccgaatatattcttataaaagactccaatagcatgagcgtgtgtgaaaatgtgtcagttgacctctctccctgcatatacccaccttggcccactcttcttgctctagttaagaatttggtgtgtatgcttccagaccttttgaagtgcacccccctacatatttaaatatagatttacaaattgatatgctccacccagcagtcagagtgatattttttaaaccaaattcagatgatgttagccccactgaaagccctctgctggcttcatcttgtggtaaaatcccgctgtcccttggccaggctgggaaggctgtctgccatctgaccctgccttcctttccaacctctgtcttcctctgctcctgtcacgctggcttctttcctgccccttggatgtgccacacgtgtttctggtcttaggacctttgttcttgttgcatcttcctggaatgtttctgccctagttctttacacagctagattgtttttctctttcaaactgagaaccgtgcatgttgcctcctcacagaggccttccctgaccactgcagctgaggtctctgccctcccctcctggtcgttctgtcccatgaccctgagtgtgtactctaagctgaaattgcatgtctgtgtctgtcccttcctcttttgagtgtcagctccctgaggtcagggattgtcttggttctggctctattcttagttcccagaatgatgcctggcacatcacacactcaaaatatttgccaaatgaataacttcatgtgcataatcccacagtaattgttgatttaaaaaaaaatttttttttaacaattttggaggaaaccactcatttagaaggataagaacttaaacctgattttaacatggtgctcactgtcgtgaagcctagagtaagaggcagtttattcatgggttcattaaacagatacattttacgacttaatatgcacccagtactgtgctagcactggggatatatatgtaaataacacacctaaggtctccagtttcagggcaggtctcacagcagggaagatgacaacatataaactaaaatgatttccaactgtgataagcttagtgaaggaactaaacaaggggctgtgctgcagaggaaacagggaaggggctgctttgggtagaatgggaagctggctctagggagctgagaattgacatcagacctgaagagtaagaatgaatgggccagtgaagagtcgggacaggccttgcaggccaggagaggagcaggtgccaatgcctgagccgggccaggcctttgtttgtctgagtaacataaaggaactggacagctggcactggaacttaggaagcatgttgggggtggcaggggtgggtggagggtgaagttgaagagagattgatgtgatctaacttagggtttttttgttttttttttttttttttttttgagacagcctcgctccatcacccaggctagagtgcagcggtgtgatcccagctcactgcaagctccgcctcccgggttcatgctgttctgcctcagcctcccaagtagctgggactacaggcatctgccaccacgcccggctaatttttttttgtattttttagtagagatggcgtttcactgtgttagccagaatggtctcgatctcctgaccttgtgatcagcccgccttggcctcccaaagtgctgggattacaggcatgagccaccatgcccggccttttttttttttttaaatgagacagaatctcactctgtcccccaggctgtagtgtagtggtgccatcttggctccctactacaacctgtatctcccgggtaaaagcaattatcctgtttcagcctcccaagtagctgggactacaggtgttcgccaacatgcctggctaatttctgtgtttttagtgaagacaggttttcaccatgttggccaggctggtcttaacctcttaaccgcttgacttcctgacaccttggcctcccaaagtgctggaattacatgcgtgagccaccgtgcccagctgtaacttaggtttttatttatttatttatttattcgagacagagtttcactcttgtcatccaggctggagtgcaatggcatgatcttggctcgctgcaacctttgcctcccgggttcaagtgattctcctgcctcagcctcctgagtagctgggattacaggcgcccgccaccacacctggctaatttttgtatttttattagagatggggtttcaccatgttggccaggctggtctggaactcctaaccttgggtgatcagctctcctcggcctcccgaagtgctgggattacagaagtgagccaccgtgcccagccataacttagggttttgttttttgttttgttttgttttgttttgtttttgtttttttttgagatggagtctcgctctgttgcccaggctggaatgcagtggcgcaatctcagctcactgcaacctctgcctcccgggttaagcgattctcctgcctcagcctccagagtagctgggactataggcacatgctaccacgcctggctaattttttgtatttttagtagagacagcatttcaccctgttagcctggatggtctcgatctcctgacctcatgatccacccgcctcggcctcccaaagtgctgggattacaggcatgagccaccgtgcctggccataacttaggttttttgttttttgtttttgtttttgtttttgttttttttttttgagacagagtctcgctctgtcgcccaggctggagtgctgtggcatgatctcggctcactgcaagctctgcctcctgggttcatgccattctcctgcctcagcctcccgagtagctgagactacaggtgcctgccaccatgccccgctaattttttgtatttttagtagagacagggtttcaccgtattagccaggttagtctcgatctcctgacctggtgatctgcccacctcggcctcccaaagtgctgggattacaggcgtgagccactgctcccggccaatttaggtttttaaaatgtggatttggggcaatgaatttggatagacatttttccaatgaagatatacagatggccagtaactacctgaaaacatcatcagtcattagggaaatgcaagtcaaaaccacaaggaggagctgggtgagtggcgctcacctgtgctcccagctactcagaaggctgagaagggcaacagaaggccggaaggccagcctgggcaacatagagtgagacagtctctaaaaaaaccacaattcacattgtgggtgtgaatataaaacagtgcagccagtgtggaaaaacaccttgaaaaacatttcctccaaatgttaggccgggcatggtggctcacgcctgttatcccagcactttggaaggccatggagggcgaatcacctgaggtcaagagtttgagaccagcctggccaacatgatgaaatcctgtctactaaaaatacaaaaattagctaggcatggtggcaggcacctgtaatcccagctcttgggagactgaggcaggagaatcgcttgaacccaggaggtggaggttgcagtgagctgagatcatgccactggactccagcctaggtgacagagtgagactccatgatcaaaaaaaaaaaaaaaaaaaaagttagacatagactcactgtatgagccagcaattcaactcataggtgtatatccacggaattgaaaacaggtattcaaacaaatactagtacccgaatgtcccagcaacactattcacagcaaccccaagtatccactaagtgatggatggatatttaaaatgtgacgtagccacacaatggaatatgtttcagctataaaaaggaatgactgccgggcatggtggctcatgcctgtaatcccagcactttgggaggctgagggggacagattgcctgagctcaggagtttgaaaccagccagtgccacacggcgaaaccccgtctctactaaaaatacaaaaagaattagccaggcttggtggcaggcacctgtaatcccagctacttgggaggctgacccaggagaatcacttgaactggggaaacgggaggttgcagtgagtctagatcgtgccactgaactccagcctgggtaacaaagcgagactctgtctcaaaaaaaaaaaaaaaaaaaaaaagtctgggcgcagtggctcaagtgtgtaatcccagcactttgggaggctgaggcgggcggatcatctgaggtccggagtttgagaccagccttaccaacatggagaaactctgtctctactaaaaatacaaaattagctggacgtggtggcacatacctgtaatcccagctcctcggaaggctgaggcaggagaatcccttgaacctggggagcggaggttgcagtgagccgagatcacgccattgcactccagcctgggcaacaagagcagaactccgtctcaaaaaaaaaaaaaaaaaaaaaaaaggaatgacctacccattcatgtggcaacatgaatgaaccttgaaaacatgatactgagtgaaagaagccagacacagaaggccacgtattgtaggattctatttatgtgaaatattatggggcgggcgtggtggctcacccctgtaatcccagtgctttgggaggccgaggcacgtggatcaccagaggtcaggagttcgagaccagcctgggcaacatggtgaaaccccacctctactaaaaatacaaaaattagctgagcgtgttggtgggtgcctgtaatcccagctgcttgcggggaggctgaggtagaagaattgcttgaacctgtgaggcagaggttgcagtgagctgagattgagctactgcactccagcctgggcaagagtgagacctcgtcttagaaaaaaaaaaaaaaaagtttctgaacaagaggcaaatccttagagctaggcagcccctggttccccgggctgtggggaggggctgtgggaatgactgcttaatgggaatggggcttctttttggggtgatggaagtgtctttaaattcgattgtggtgatggctgtaaaaccctgtaaatatactaacatttatttaattatacacttaaaataggtgaatattaggatatatgaattctatctcagtaaaacttttaagaaatgtttactcaaacatttaaaaatttaggacaaactattgatacatttatttaacaattaggacacactgttgatacatttatttaacactatgggcgaatatcagaatagttttgctggatgaaagaagccaggcaaaacagagtatagactatactttcttttatgtaacattctagaaaatactatccaatctgtactgatggaaagtagatgggtggttgcctagggccccaggggcagggagggacgggagggacagctgggagagataacaaaggagaacctttgagggtggcaggcgtgtttatttcttgattgtggtgatctgggtttcccatgtgtgtcttttactttttttaaatatttctttctttctttattttgagacggagtctcgctctgtcgtcaggctggagtgcagtggtgtgatctcggctcactgcaacctccgccttttggattcaagtgattcttctgcctcagcctcccgagtagctgggactacaggtgctcatcaccacgtccggctatttttctatttttagtatagacagggtttcaccatgttgaccaggctggtcttgaactcctgacctcaggtgatctgcttgccttggccactgaaagtgctgggattacaggcgtgagccaccacgcccagcctcccacgtatgtctttatgttcaaatttattgaattgtacccttttaatatgtgcagtttattgcatgttgattattatattatttatacctctgtaaagctgtttaaaaagagtgggtctggatgctgggtggaaatggcttggaggggtgagaactggaagttgaagagtcagtggaggtggttgcagccgctcagtgggagacgactcagtttgactagggtgaggtctgtggagagaggtgggtggatgacgtgtgctttggcgggacccataagacctggggatggatctgatattgggggtggaataaaggtaggaaaaataggtgatttttaggtgttttgcttgagcagagctctgtctttatcatctctgtttatctaaaatagactaggaactgagggaagactcggggagagacacgctttaggagtaggggatcacgtttcccacgttggaaatcctgtgtgaggtgtgtgaggcgtccaggtgggtggaaacttggtgctgggagaggttgggacgcatcagcatgcacatggtgtttaaagcaggagtgcaggctgagagcccccgagggcctagacccaacctggagcggtcaggagaggagtagacggggagtctgggctgggtggctggcgaggatcaggaggccaggagcgcaggctaggacccaggataggggagcccaggagagctggcgtggccagctgggctgagtacctgtgggtgaggatggtgagatgggcattggacagagggacactagggtctttggtgacaaggagcaatttctgtggagtgaaggggcaggcccagtctagagtggattgaagcaggagcaggaggcgagggagtggggtcggtaggtggaggcagcttgtcggggacattctgcttcgaagggagcagctggaatgtgggggtcaaggctgtgtgtgtatatatctaaggcgggaggtgccagcacacgtttgaatgaggagtcatggaggaggatagcaagcgggcattcgggaggtgccagcacgtgtttgaatgaggagtcatggagaaggatagcaagcgggcattcgggaggtgccagcatgcgtttgaatgaggttcatggaggaggatagcaagtgggcatttgggaggttccagcacacgtttgaataaggattgtggagaaggatagcaagcgggtattgcagggcatagtgtctgtgaagggcagagggggaggatccagggcacaggtggagcccaggagaagggagtggtgtggcttcctcctgtgcagcaggaagggaggaagaagtgagcccggcggcaggtgagtctccagatccatgatgaggtgggcttggagtctcacccacaagaaggttgaggaaatggggcgggtgtgtcctggctgtgcccagagcaccagagagggcattgaagagagctgccaggcagctgcaggccctggcttggtgtcaggaattgaaggtgaaacaagtccaactgatgatgtgaattttcttctccggcaacatttagttgcttgggtgcaggtgggagcagtgggatagctgggctccttcagggcctggccagacaggcctgggtggaggatgagaagcacaagcagaggatggcagcgaaggctgggccccagctggatgaaggcaggccgctaagctgggacaaggagggtgtctccacgaggctgaagagttgagtacagaatgagataatgcatttgctgaagcgtcgtgggtggtggccagggaggcaaagcctgagacgaggttttggggggaagtgattccaagctccgggggtgacactaggagaggtattggaggttgggtgtttggaggtggagaggaagttgtttggaggtggggagggttaggaactgagcgacaaggtgttggatctgtacctatgcacacacatatatgtggacatgtgtgtgtcaagtcactgaggatggtgatagagcaggaatggagaggatggcgagccagcgagtgaggtgcataagggacagtaactggcaatggtaggtgacagtgagtaggaagggctctaggggtgtgctgtcgagtgtgggcattggcatcagggatctggaaggagcagtggagaaggcagacgctgccctcacctgccatctctgaagtctgtgggggatgaggaagaggcagctgtcactcagaggcgagttggggaggtgctcccttcgtgtgaggccagttttggttggggcaggagtgaggatgctggggagaggctgagtctttaggagaggggattgcgtggttggtggaggtagtgccaagtatcaggtaatgagagggcacaccctgtgcccagggacccgggagtctcacctctgcctgttgagggacgcgtttgccagagagaaagcgtcagcaaagtgccatcttccagaggctcagcaagacgtgcaggaggcacaggctccagtagcgaacgccagcctcatgagggtgtttgggaccaggtggctccattagtgagggctggggccctgtgggcatgagggcgcaggcacctgggaggccatttgggtcagctctcccgcggagctacgaccttggggatgtggcgctcctcacgcggagccaagccaagccaaggccaagcctgtgtttcagggactcgatcactgcagggcttagcctggcatggagtaggctccttctctgtgttctccaggccaggggacttgcatgccagaatccttcttcctcatagatttcttgacttaccactctgcattgcaggaggccctccagtcagatgtccagcccagagctggctgcctgtggctgggtagggtcatgtggctgcccagggccatgggataggccgacacctctggtgtggatatagtacaggggagtgggtctcccacagcaggggaagggttcagactcagagggtccagccctgtgaaggcagggcaggtggtgaaggcctcggggtggtgaagtcatggggctgcaggctcaacctcctttctcttgttgacagcactgacgtcttcatctgcacaagccccatcaagatgttcaagtactgtccctatgagaaggtaaggcgtgcgtctgctcagctgagcccttaccccatgcatcacaggtgaggggtacggggctcagcctgcctgtggaaaggggatggaccctcacagcactcccccacctctgtgacagcggctttctgctccccaaggacctctccagcctgaggctctagatggggcctcttatgatgcaggttctccaggaagggtgcctgtcactgtgtcaggttagcctggcccagagtaggcctttgaagggtgagaaccatgcctggggagggcctgaaggcacgtggatgcattaacatgaaaagtcttaaaaaggtgaggtgggtaaagttcattttgctgtatactcactttattatctttattgaaaagaattagagttgcatgaaattgagacctttctggaaattgggaacttgcagttgccaaacccagaggaaaggtctgtggccctggaggagagcactcatgccggaggggtcagggccggccctccctggggacgttggagcagctcttcccgagctgaggaaggcaagatcttcagtccagagcccctcctgctctgggggcgtcaaaccttcaggcatgagttctttcatgttcttcacatgacctttccgctctggattcccattttttttgagacagagttttgctcttgttgttgcacaggctggagtgcaatggcacgatcctggctcactgccaagatcactgggttcaagcaattctcctgtctcagcctcctgagtagctgggattacaagtgcctaccaccacatccaggtaattttttttgtatttttagtagagacggggttttgccatgttggccaggctggtctcgaactcctgagctcaggtgatgtgcctgcctcggcctcccaacgtgctgggattataggcgtgagccaccgtgcctggcctggattccatatttaaatgaaattcatggtcaggcgcggtggctcacgcctgtaatcccagaactctgggaggccgatgcaggtgggtcacctgaggctgggagttcaagaccagcctggccatcatggtgaaaccccatctctattaaaaatacgaaaatcagctgggtgtagtggttcatgcctgtagtcccagctacttgggaggctgaggcatgagaattgcttgaacctgggaggtggaggttgcagtgagccaagatcgtgccactgcactccagcctgggtgacagagcgagactgtccccccacaaaaaaacttaatttaaaaaaaaaaaaagaaattcacacattcagccaacatagcgtgccctctgtgtgctcagtgggaatcacacttgctgaacagttgctctggcattatgtgggtgcttggtgcccactgtttcatcatgtcctcatgacaccttgttccctagttaccctgacatccctcatgattttagagagtgggtcttgttctgtcacccaggctggagtgcagtggccactcacaggtgccatcccagctcactgcagcctcgaactcctgggctcaagtgatcctcccacctcagcctcttgagtagctgggaacacagctgcgcaccacgcaccaccatggccggccttcgctgacccccttttaacacgctaggagcacgagttcacttatacttaggagagaggagtatcttacctgcagccagtaaatgtggattcagagtgtgggccaggcccactgtttcaggtcgagcagtgatcccaaagtgagtcctgagaccagagtcagcatcccttggagactccttaggagtggacatttttcagccccaccctacaccttctgaatcagacactctgggagtagcaatgtgggtctgacgagcccgccaggtgattctcatacaccctcaagtttaaggattgcgggactggagtcactatttcagctggagtttcactgggtggccatggtggttgaccagcagttgtgggagtgagatgaacgacatggcctcattcatccgttcctggggatttagatactgtctttgtgccagctgtcccacctgcgttgcctcggcccgggactgccctctgagctccagacactcagacccgatgtatctgtccctggggtgctggtttccttgtgcatggcagtgctgtctggtggcctcaggtcggaaatcaggggccgtgctgatgtcttcctctaagccctcacttccagcctgttggtgagtcccatgtcccatgggaccgatttcgaaaacgtgcctggcacctgtctgcttctgtctcttctcattgccagcatcttggcatttactgccagtacagctgacagggcctcctaaactgcctgctcctttcagttccatgcaggctgacaaggccctcacagagcagatcatggcagctcctgacttgaaacctctgaatagtttccctttaaaaaccacatacaccctcctgagcatgacctgcagggcctgcctgcctctccacccactgtgcccccctctctgtgtgcttctccagcagcttttggcttggaatgttctcctcccacccctaggtctggtgccttcttgtccacgaggcctcggcccagaagtctccccacatttcgtgaccatcatattgaagtgtattctttctccatcttgttttttggatgacacttcccaccacttgaaatgggtttgtgttttcgtctgtggcttgttcttggtccatctcctgactgggctgggacctgtgcaggctgggctctcaccctcctgcccactgtcaagcccagcacccagcgcagggtggcacactgggaggactcagcgtttgttgttaaatgagtagattcatttgtccaacagagagttattaaacaccggcgagtacagtgcttgccattcatttgacacctttgatacgccaggcaatgtccctttattctcacttttgaggtttacaacagctgcctgtgaaacaagaaaactcttctgatttgacagatgaagaaactgaggctcagagggatgaggcagctcatttaccaggtctgacgcttggccagccagtgaggcctgctccgggtctgcctgtcaagagcctgtgcccaccgccagtgtgttcccctggaggtagcctgcattcactggagaggatttggaaaccgcgcatatttaagaggaaagggatgtcaggaccccagtcacagtaacatcaacaggctctggctcacttgaacaaaggcaggactgattagaaggatattgccttgctcagggaatcaaagggaagcccgaggaagcaggcctgaggccgtaggggcagagcccgcagaccgtctctccagcaaacagcccaagacgctgaagcgccctttctccatccttgggtttcattgcccaagattcctagtccccaggagagggaggcccatcagctgagcttgggtcccacacccagccctgggtgccctgatggactgtcctaaaaggctgcagttggtggcagaggcgtggcttcccagaggagttgagatgctgttgccagaagaagggtcacactcatagtggatgtcctgatcaaactaaacgaaagagcaaaggcaacaagaatccacatctacaatcccaccacctggagagagatgctgttagcactttgatctggttctttctagtttttttgtgggggagtaggggagacagggtctcactatgtcacccaggctggagtgcagtggtgcgatctcggcttactgcaacatccgcctcccaagttcaagtgattctcctgcctcagcctccttagtagttgggattacaggtgtgcgccaccacacccggctaatttttttttgtatttttagtagaaacagggtttcatcatgttggccaggctggtctctagctcctgacctcgtgatccacccatcttgtcctcccagagtgctaggattacaggtgagccaccacacccagccctcgtttttctttgatgcgtattaaatataatacatgtattttaacaaagctttcatccaacatagttatccttttctgcttattaatatatttttagccttttttctgtcatcaaacacttcagaaacatgatttttttttttttttgtgagacagggtccagctctgtggcccagactgaagtgcagtgacacgatcttggctcactgcaacctctgcctcctgagtttaagtgattctcatgcctcagcctcccaagcagctgggacaagtgtgtgtcaccatgcctggctaattttttatatttttgttctgttttgtttgagacagagtcctgctctgtcacccaagctggagtgcagtggtgcaatctcagctcacttcaacctccacctcctgggttcaagtgattatcctgccccagcctcctaagtagctgggattacaggtgcgtgccaccatgaccagctaatttttgtatttttagtagagacggggtttcgctatgttggtcaggctggtctcaaactcctgaccttgtgatccacctgcctcggtctcccaaatgctgggattacaggcgtgagccaccacgcccggccaatttttttgtatttttaatagagatggggtttcaccatgttggccaggctggtctcaaactcctagcctcaaagtagtctgcccatctcggtctcccgaagtgctgggattacaggtgtgagccaccatgcccagccagaaacatgattgttaatagctgaagacgtctagtgagtaagcctttgtatggtcatgttcttagggtgaattccaagaaatacaattcctgggtcacgcgaggaaaggtagggttcgggtatatatcacacagaaatttgtattcatttccactgtaccagccgtgggcagggtactttcctcctgccaggggctaggctggaccacatagggtcagtcaatagaggaagcaggccattgaacaaacacatgaagacaggaaagtgcacagcagatttgaggaattcagggtgaattttgttggccagtggctacaggggctgattgggagcggggttgggccaggtgaaatggattagtttatccaaatctcccagctgtcctcatggtttagccacaccaccacctttaaccctagaactaagacaaggggagaagtgcgggtgagaagtgagtaaggcgaaggttgcttccaagcaccccctcacccaccgtttgtgcccctcccaaccctatggactggtacttcttccctggctgagggcgggctggtattaatggttcctgtgttccatgcctgggggaggcaaggaagggctggagatgggtctcggggcacatctgcacaggacagaggtctcccacggtagccccggtctaggcttaagccccagagcactcacagttccttccccagctcctgtccactgagtaggttcagcctttgttgctagaagtggaaacttttctccttggttgattttctttcaagacccagtcagaggatgggaacctgactgctgtgaggtctctcactttatcaccacatggagggagtggaattgggttacattcaggttgccagaaccttctttctggctggaaagaaggtttcccaacattctaaacccagattgctcggtaatagttaacaatagccaagctggtagtatacgtctccaagggctttccctgtagtgatccatttagccttcatagtagccctacaaaataggtatttctattttttatttttattttttagacggagtctcgctctgtctcccaggctggagtgcagtggcgtgatcttggctcactgcaagctccccatcccgggttcatgccattctcctgcctcagcctcccgagtagctgggactacaggtgcctgctaccacgccgagctaatttttttgtatttttagtagagacggggtttcactgtgttagccaggatggtctcgatctcctgacctcgtgatctgcccgcctcggcctcccaaggtgctgggattacaggcgtgagccgcagcgcctggccttaaaataggtatctttattatccctgttctacagatgggcagactgaggcacagacagttgaagctgagggttagcggccagaaagtggggagtcagacttcagagcccatgctctgctcctcggcctcactgcctcttctcggactccttgacttgaaacttaagcagcatgacctgtaccttttcaccccctagagagatttgaaaatccgtgtcaggttcttcatgcacaggcatggcattttactctgagattttccagttcaacaaggggagtaatcacaagccaaattaagggaggggcttgggtgcgaaggggaatgtgctcttctgatttgaagtctggtttccagatgacatgtctgcctgattcgacgttgatttttagaataaatgtcaaaaattcccacttcaggccgggtacagtggctcatgcttgtaatcccaccactttgggaggctgaggcaggaggatcacttgaacccaggagtttgagacctgcctgggcaacatgatgagaccccatctgtactaaaaaaaaattagccaggcgtgctgatgtgtgcctgtagttgcagcatcttgggaagctgaggtgggaggattgcttgagcctgggaggtcaaggctgcagtgagctatgatcatgccactgcattacagccttagtgacagagtaattccctgtctcaaaaaaacaaaaacaaacaaaacaaaacaaaacaaaaacctactcctggctgggcgtggtggctcacgcctgtaatcccagcactttgggaggccgaggtgggcagatcatgaggtcaggagattgagaccatcttggctaacacggtgaaaccccgtctctactaaaaatacaaaaaattagccgagcgttgtggcgggcgcctgtagtcccagctacttgggaggctgaggcaggagaatggcgtgaacccgtgagacagaggttgcagtgagccgagatggtgccactgcactccagcctgagtgacagtcagactccgtctcaaaaaaaaaaaaacaaaaaaaaaacccactccttaattgagcctcttcctctaacctgaaataaaaacgtaaaaacgtagactttttttttttttttgacagagttttgctgttgttgcccaggctggaatgcaatggcgtgatctcagctcactgcaacgtctgcctcctgggtttaagtgattcccctgcctcaacctcctgactagctgggattacaggcatctgccaccatgcccggctaatttttgtattttttgtagagacaaggtttcaccacattggccaggctggtctcgaactcctgacctcaggtgatccatctgcctcagccccgcaaagtgctgggattacaggtgtgagccaccgcgcctggccaacatagaccattttttttttaacttaagataatgaattacatttctttgctttctttctttctttcttttttttttttttttttgagacggagtctcactttgtcacccaggctggaatgcagtggtgtgatctcagctcactgaaagctcagcctcccgggttcacgccattctcctgcctcagcctcccgagtagctgggactacaggcacatgctaccacacctgtctaattttttgtattttagtagagatggggtttcatcgtgttgcccaggctagtcttgaactcctgagctcaggcaatcgcctgcctcagcctcccaaagtgctaggattacaggcgtgagccactggacccggccttctttgcatattttacattaaatttccagttgctccagtacgttttccagttactccctgtaggacttaggctaaaagacttggcactttctcttggcatgtaaagaaaccctaggttcttttggggatggcacggccacactgccagcattcaggagcttcccctggagctcctgaaccccagtgtcacccctgccatctcagtggggctcatggtgtctttcttggcgtgtttctggcccataccgtgtttattttaaaaattgttcatgctaattggcatggggtttcttttaggggtgatggaaacattctggaatttagatagtggtagtggttgcataacattgttgatacactaaagaccattgaattgtacactttaaattggtaaattttatgatatgtgaattacatttccaaaaaataaaataaaattggctgttcagatggctaataattccaaagctaactcactccttctagttagatctggccatttcatcattgtaatagggattgtagacaaaagtgcatgatccctttatttatttatgtaattttttttttaaagacagagtctcgttctgttgcccaggtggattctagtggaacgatcatagctcactgcagcctctaactcccagaccatcgtgcctggtcataatacctttaaagtgtcctagatcaagccattcattttgaaaacctccagttttatggtattctttttctttttcttttctttttttttttgagatggagtctcgctgtgtcacctaagctggagtgcagttgcgcgatctctgctcactgcaagctccgcctcctgggttcacaccattctcctgccttggcctcccaagtagctgggactacaggcgcccaccaccatgcctggctaattttttgtatttttagtagaggcagggtttcagtgtgttggccaggatggtcttgatttcccgacctcatgatccacccgcctcggcctcccaaagtgctaggattacaggtgtgagccaccgcatccggcctatggtattatttttctagcagtgtcattcacccaactccacacctgcataccccaccctccttgatttaagacctgtcttgggatctgctcatctgagtggagcaggactctgtcccttccaacattttgcctgctagggactgtgtctagctcatagatctcttatttctgatgtgtccatttggtcatgggcctgtgagccacgcggagcaggaagggcagggaggtggggtcgagagctgccagccatctgcccctctgatcttttccagcactgtcctctgccagcatccccctttacttctgtgtcttcttggtaatcactgaactctttgctctcgaggtggttcatggacttcctgcctgcactcctaggtcttggagagagcgcctcccctgggagtcctgccagcaattctttagctacatgtagttttaggttccatggcaggcatttttcctgattctggtttagaacgacagcaccgctttatgcttggatacctttacattcatctgggctgaactattttctccccagagctttcaggaaccaaaatggtaatcaggtgatgagcagcccttctccttccaaacagctgctgataaacctaacagacccttgtcaggcaaatctgagctaaaggcacaatgcccccaccagtgtgcacattattatagctgttgaacctacgtcagtgcaccatggtcactcagagcccatagtttacatcagggttcactcccggtatcctgcgttctgtggtattggtaatcggggaggctgtgcgttgtgtgggagtggagggtatatgggaactctgtacctctgctcaattttgctgtaaacctaaacctgctctaaaaaataaagtctcttaaaaaaaatccacagtgaatgagagtccctcttgctccctatccttgtcagcatttggtattgtcagggctctggattttggctgttctcataggcagggagtggtgtctcattgttgttttgatttgcatttccttgattaatgacattggacatgtttttaagcaagtaaccctttgtatattttctgtaacgaaatgttcaagtcttttgcctcgtttctcattgagttgtttgtgagttgtgagagttctttagatatgctagaaacaagttctttatcagataatgtgttttacaaatattttatcccagtctgtgatttgtattttaattttctttttcttttttttcttttttgagagacagagttttgctgtcactccagctgaagtacagtggcatgatcccgcctcactgcagctgtgaccccctgggctgaagtgatcctcccaccttagcctcctgagtagttgggactataggtgtgtgccgccatgccaagctaatttttaaaacactttttttttgtagagatggggtcttgctatgttgcccaagctggtcttgaacccctggactcaagcaatcctcctgccttggcctcccaaagtgctgaggttacaggtgagttttctcaacagagtctttagaagagcagaagttttatacttttagattttttatttaggttatgatccatttgtttttttgagacggagttttgctttgtctccctggctgtagtacaacagcgtgatctcggctcactgcaacctccgcctcccaggttcaagcgattctacctgcctcatcctccctagtagctgggattacaggcacctaccaccatgcccagctaatgtttttgtatttttttttttttttttgagatggagtctcactctgtcacccagtctggagtgcagtggcacaatctcggctcattgcaaactccacctcccgggttcatgccattctcctgcctcagcctcccgagtagctgggactacaggcacccaccaccacacctggctaattttttgtatttttagtagagacggggtttcatcgtgttagccaggatggtctcaatctcctgacctcatgatccgcccgcctcggcctcccaaagtgctgggattacaggtgtgagacaccgtgcctggtatgtttttgtattttagtagagatggggtttcaccatgttggccaggctggtgtcaaactcctgacgtcaagtgatccacctgtcttggcctcccaaagtattgggattacaagcgtgagccaccatgcctggctcgttttgagttaattatcatatattgtaggaggtaaaaatggagaggttttttttttttttgcatgtggatccagttgtgcctctgttggaaaggccaccctttctcactgaagtgtcatggtagcctggggtccatttctggaatgtatcctgcttctctgatctaagtgtcccacctaatgtaaataccacactgtctcagttactgtagtttttttttttttttttttgagatggagtcttgctctgtcgccaggctggagtgcagtggtgtgatctcggctcactgcaacctcctactgggttcaagtgattctcgtgcctcagcctcccgagtagctgggattacaggcacgcgccaccacacccagctaatttttgtatttttagttgagacggggtttcaccatgttggccaggatggtcttgatctcctgaccttgtgatccgcccactttggcctcccaaagtgctgggattacaggcgtgagccactgtgcctggccactgtagttttatagtaacttttgaaagcagtgtgagttttccaaaattattcttcattttaaaaattgttttggctattctgggtcctttatatttctatagaatgtttagaacaagctggtcagtttctacaaagaacctggtgagaatttgattgcaagtgcattgtagctataaagcttaacaatattgggtcttctgatccacaagcacatacacatcctcatttatgtaggccacctctaccttctctcagcaatgttttgtagctttcagtgtaccactcttgcacatattgtgttaaatttgtctctatttcatgtttttttttttggcatagagactatctttataaatatatttttaaatattttataatggtaaatacacatgataaaatttatcaagtgtacagttcagcttatttcgtttttaatgctattataaactttgtttaattgaaatttccaaatatatagaatacaagtgatttttttttttgagatggagtcttgctctgttgcccaggctggaatgcagtggtatgatctcggctcactgcaagctccgcctcctgggttcatgccattctcctgcctccacctcccaagtagctgggactataggcgcccgccaccatgcccagctaatttttggaatacaagtggttttttaattttaatttttaatttttgtgggtacatagtaggtgtgtatttatgaggtacattagatgttttgatacaggcatgcaatgtgtaacaaacacatcagggcagatggggtatccattatcaccttaaacattcaatcctttgtgttatagacaatccaattatattcttagttgttttaaaatgaacaatttttttttttgagatggagtcttgctctgtcactcaggctggagtgcagtggcgcgatctctgctcactacaacctctgcctcctgggttcaagcagttctcttgcctcagcctcccaagtagctggaactacaggcacgtgccaccatgtccggctaatttttgtatttttagtagagacggggttttgccatgttggccagctggtctctaactcctgacctcaagtaatccacctgccttggcctcccaaggtgctgggattacaggcatgagccaccacgcctggccatgaacaattaaattatttttgattatagtcaccctgttgtgctagcaaatactaggtcttattcattcttttttttttttttttttttgagatggagtctcgctctgtcacccaggctggagtgcagtggcgcgatcttagctcactgcaaactctgcctcctgggttcacaccattctcctgcctcagcctcctgagtggctgggactgcaggtgcccgccaccacgcccagctaattttttgtatttttagtagagacagggtttcaccgtgttagccaggatggtcttgatctcctgacctcgtgatccgcctgccttggcctcccaaagtgctgggattacaggcatgagccaccgcgcccagcctattcattctatttttttgtgcccattaactctcttcactttccttctagatactcctccactcccccttcccagcctctactaaccatcctcctactatctccatgagttcaattgttttaatttttagctcccataggtaagtgagaacatgtatagccctttctgtgcctggcttatatcacttaacataatgacctccagtgccatccatgttgttgacaatgacaggctctcattcttttttcttttcttttttttttttttttgacggagtcttactctgtcacccaggcttgagtgcagtggcgtgatctctactcactgcaacctccgcctcccgggttcaagtgattctcctgcctcagccacctgagtagctgggactacaggcatgcaccaccacacctggctaatttttgtatttttagtagaggtggggtttcatcatgttggtaaggctggttttgaactcctgacctcttgatccaccctcctcggccttccaaagtgctgggttgctctcattcttttttatggctgaatagtacttgattgtgtatatttaccacattttttaaatccagtcatcagttgatgtacactgaggttgcttccaaattttggctattgtgaatagtgctgcaataaacatgggagtgcgagtatcttttccatatactgatttccttttttttaggggtatatacctaggagtgggactgctggattttcagaggaactgccattatattcctaccaatagtgtacaagggttttattttcttcttgtcctctccagcatttgttattgcctgacttttggataaaagccattttgactggggtgagatgatatttccttgtagtttgatttgtatttctctgatgatcagcgatattgagcacctttttatatacctgtttgtcatttgtatgtcttttgttttgtgttgttgagacaggatctcgctctgtagctcaggctggagtgcagtggtgtgaaaatagctcactgtagcctcaacctcctggactgaagctatctttccacctcagcctcctgagtagctgggactatgggtgtgtgccaccaagcctaattttttttttttttctttagactgggttttgccctgtttctcagactggtgtacaagtggtttaatcatggctcactgcagccttgacttcccaggctcaatcaatcctcccaccttagcctcccaagtagctgagactacaagcgtgtgccaccatgcctggctaatttttgtatttcttgtagagacggggtcttactatgtagcccaggctggtcttgaactcctgcccacctcagcctcccaaagtgctgggattataggtgtgagccatcacacgcagccaccatatgtcttcttttgagaaatgtctatttagatcttttgcccattttaaaatcagattattagatttttttctatagagttgtttgactccttatgtattctggttattaatcccttgtcagatggatagtttgcaaatactttcttccattctgtggattgtctcttcactttgttgactgtatcctttgctgtgcagaagctttttaactggatgtgatcccatttgtccgtgtttgctttggttgcctgtgcttttggggtactattcaagaaatctttgtccagaccaatgtcctggagagtttccccaatgttttcttttagtagttcttgtatatggcaagagataggggtctagtttcattcttttgcatatggatatccagttttccagtgccatttattgaagagactgtcgtttccccaatatatgttcttggcacctttgtcaaaaatgagttcaaggtagatatatggatttatctgtgggttctgtgatctttttttttttttttgagacggagtcttactctgtcgcccaggcgggagtacaatggcaccatctcggctcactgcaatgtccgtctcccgggttcaagtgattctcctgcctcagcctctggagtagctgggactacaggcatgtgccaccatgcccagctaatttttgtatttttagtagagatggggtttcaccacgttagccaggctggtcttgaactcctgacctcacgctatccgcccgcctcggcctcccaaagtgctgggatttcaggcatgagccactgcgcctggcctggttctgtattcttatccactgatctgtgtgtctgtttttatgccagtaacatgccatttggactactgtagctttgtagtatcatttaaagtcagataatgtgatttttccagttttgttccttttgcttaggatagctctggctattctggaatttttgtggttctatgtaaatgttaagggttttttttttttttttttttttgtatttctgtgaagaatgtcattggtattttttttttttttttttgagatggagtcttactctgtcacccaagctggagtgcagtggcgcgatctcggctcactgcaagctccacctcccaggttcacaccgttctcctgcctcagcctcccaagtagctgggactacaggcgcccgccaccacgcccagctaattttttgtattttttagtagagacggggtttcactgtgttagccaggatggtctcgatttcctgacctcgtgatctgcctgcctcggcctcccgaagtgctaggattacaggcgtgagccaccgcacctggcctgtcattggtattttaatagggattgcattaaatctgtaaattgctttgggtagtatgaacattttaactatatttattcttctaatccatggacatggaatgagtatctttccactttttgtgtcttcaatttattctatcagtgttttatagtttacagtgtagagctctttcacttgggttaattcttaggtattttattttatttgtagctattttaaatgggattcctttcttaattttttttcagattgttcctgtttttttcaggattgttcctgtttttttcagattttgtatcctgcaactttgctgactttatcagttctagtagttttttggtggaatctttaggtttttccaaatataagatcatgtcatctgcaaacaaggataatttgacttctaatcctttctaatttggatgctctttctttctttctcttgtctgattgctctagcgaggacttccagtactatgttgaatcacagtggtgaaagtaggcattcttgtcatgttcccggtcttagaggaaaggctttcagtttttccccattcagtatgatactagccatatataggtctgtcatatatggcttttattatgttgaggtatgttccttccatacccagttttttgagggtttttatcatgaaaggatattgaattttatcaaataccttttcagcaccaattgaaataatcatatgttttttgtccttcattctgttgatatgatatatcacattaattgatttgcatttgctgaactatcctggaatccctgggataagtcccacttggtcatgctggatgatctttttaatgtgttgttgaattcaatttgctaatcttttgttgaggattttaggaatcaatatttatcaatgatattggcctatagttttcttttctttttttcaatgtgtttttgtctggttttggtatcacggtgatactggcttcatagaatgagtttggaagtattccttccttctgtatatttctgaatagtttaagtaggattggtattagttatttaagtgtttggtagaattcagcagtgaagctattgggtcccggccttttctttgctgggagactttttattatggcttcagttgttgttacttgttattggtctgtttgttttgaatttcttcatggttcaatcttggtagattgcatgtatctaggaatttgtccatttcctctagattttctaatgtattggcatgtagttgcccatagtagccaccgatgattgtttaaatttctgtaatatcagttgtagtgtttcctttgtcatctctgattttatttatttgggtcttctctctttttttcttagtctggctaaaggtttgtcattttgtttacctttccaaaaaaccaactttttgtttcttttcacaaaaccaatcttttgtattttttttatttcatattcatttatttctgctctgatttttgttatttcttttctttcctttcttttcttttttttttaattttgagatggagccttgctctgtcgcccaggctggagtgcagtggcacaatctcggctcactgcaacctctgcctcctgggttcaagcgattctcctgccttagcctctcgagtagctgggactacaggtaggtgccaccatgcccagcttatttttgtttttttagtagagatggggtttcaccatgttggccaggctggtcttgatctcctgaccttgtgatctgcccgccttggcctctcaaagtgctgggattacagtgtgagccaccgcgcccggcctgctcttgtttttctgtttctttaggatgcatcattaagttgtttacttgaagtttttcttcttctttttttattttttttaaattcaggcccccacagaagcattttcttcttttttgatgtggcacttatagctataaacttccctcttagtactgcttttgctgcatcccataggttttggtatgttgtacttccattatcatgtgtttcaataaatttttcaatttccttcatttcttcattgacccacttcattcaggagcatgttgtttaatgtctctgtgtttgtatagtttccagaattcctcattattgatttctagttttattccaaaaatacatgtgatttttttatattgaccttgtatcctgttagtttgccaaattaacagttctagttgctttatgtagatgatttggggctatgaaagtctagttataataattacatttatttagtacgtctgtatcaggcattactcaggtgtcctcacagttttttatttgatcataccagcaacactgtgaggaaactgacctcacagtggaagtcactggcttgcccaaggtccccagctcgtatgtatcagaaccagacttagggcctaattttgagggtaagacaaaaaggtagaatcctttttctgaagactttctgtgtgccaggtgcagtactgagactctgatgcataattttccactaaatccccgaaggcactcacgaggtagatgctgtccttatccctgtgtcaccacacagggaccagacaacctgctgagggatagagatactcacgtgagaagctggtggtatctatgcgcagtggccacataagtgctcatggctgggctccaggaggctcagggggaaccccatgccctcttctatttttacctcttaccatatataaaatttaaccctggctgggtgcagtgggtcatgcctgtaatcccagcactttgggaggccacggtgggcggatcacaaggtcaggagtttgagaccagcctggccaacgtggtgaaaccccgtttctactaaaaatacaaagaacttagccaggcatggtggcaggcgcctgtgatcccagctacttgggaagctggggcaggagaatcacttgaacctgggaggtggaggttgcagtgagccgagatcgtgccattgcactccagcctgggcgacagcaagactctgtctcaaaaaaaagaaaaaaaaaaattaaccccaaatgggttaaatacatataaatacatatatacatataaaagctaaaagtataaaacttctgctcttcaaaaggcactgttcagaaaatgaaaagacaaatcacagatcatgaaaaaatatttgcaaaatgcattgtctgataaaggactggtttctagaatacattaactactctcacaactcaatacaaacagcccactttgttttgccgtttatgtgacccctgataagtcacagaccctctctgagcctccatttcttcatctgtacgggatctcgtcaccactatcgtggcacatcattttcccacgcaaaccctttctgcagagcagctccgtattttgtctgcagagtggcgccggtccgagatgaaacacggaaactgggtgtgtgtgattggaaatgttcatggcagtttgtctgatgcagtgttcaggcacatgatttgatttcatatcttacaaaagcattggtcacaatgcagtggaaattaaaaaaacaaaacctgacccttctcttcccacactcccagatgttccatgttccagccacactccagggttttccccattcctcaaacacctgagcaccggcctgccttggaacatcagtgtttgtttttccctctgcctggaatgttcttgccgacctgtggagagccagccgccttgtcagtcgggtccagagaagatgccgcctttgcagtgaggcctctgtgtgaggttggagctctgtgctgactgcagagcccttgccccctggctatcgttgtctgtggcctgtgtgcctcctcctgctatgtgcactccatgggtctcctgttgaccatcgtctctctggttcctggaactgtacctcatgcaatattggctaaattactacacaagtcaggaaagtttggctacttggaatgttgccgtgaggcttagatacgatgacggacactgcatgcctgtggagtgggtctgctgaaaacattagccccaggctcttgccccccatccagcctgcaccagcgatttacagtcctgtggggaagatgcgaagtaagttatagagatgtgtagctccgactgtgacattgctagggaggacaattagactgggagagttcagggaaggcttaggaggtggcagctttagaaggataggtgctcactgggctaggagaagggccctgtgcatatgtgtgtgtgtgtgcatgtgtgtgtgcacacacgtgtccatgaaggaatgttccagtcagaggaaatggcacatgtgaggctctgagcaggaaaaagcataatacagtcaagcagtgagaggaggttgtcgtgggtgggcgtggcaagcgaggtggccacagggaaaggtggcgctgggacagcggtagggctggtctgctctgcagatccggcccttttcccacgtcccgtgtgctggccggttgcagagggtcatgtggtgtctgcctttgtgaagtgggactcctgaagcgacctccaactggaagaaagccaccctaaggcacccatgtcccatttccttgtcatacacagggaaaaacggagtccctgggagggcaaggacctgcccggctctgccccagggtggcagagccctgagctccctgtgcagcctgggccactcagtgtttctgtttgtttatgcaggaaccagaggagcttagggaaaaagtgcatccagtcctgcccctcctctgcttaaaatctgctgctggttaacctctgtagctgtaacagggtctgtgacttaagggttggttgccagtgtcagaaatcaacaagggtgttggaatctggatggctgtagagacagcctggagctgggcagggctcagttagggtgcctggggcccatgggccagagcaggtgccgtgcttaggctgcgcccacccctggctgcactggggtggtgagagcagccaggacctgctaccctataggaaaaagtcaatttccccagggaatcgaggcaaagggaaaggatgccgagagcccaccagtggcgagaggatgccggtggcttgccaggccccggtctgctccctgccccccggggagcaccagcaccccagtttgctatccatcggcccagacacaccctgccccatgtccgttagcacctggaatgcgctgtgtgctaggggtgcccctgtggtcagcttgcctgtcctgaagaaagccttccttgggcagcctgtggcttctttgtaggcctgtcccaggtgttatgtaaccattgtttaagagggccttgaccgctgtctcctcagctgtaagctccctgagggtaggaactgctttttgtcttggttttctttcttcagtgcctaacagtacgcactgcccacatgcatgtggggcaggaggtggcagtggcccagcaggtggcaggggtggcacacatggccgccctctgctccctgtgtttgggttatgctgtgcagtgttcgctgggtgtgaagaggggacagggctgggtttgtcgtgactctgctgctttctagctactggagtgtggaccagccatgtgcgctccctgagtgctggcgtcctgggctggactccctcccagcactgactgcctggcgctgggccttggtgtcaggcctccatccctccctgcctgttagctgaggtctaggctgacccctgccctcggctcttggttggctcccaggtctgatgtcactttcttctcaccacctgcccttgcctgtttgcgtccagtatgcctgggtggagaagtactttggccctgactttctggagcagattgtgctgaccagagacaagaccgtggtctctgctgaccttctcatagacgaccggccggacatcacaggcaagtggcctgcgacaggtgaggagcacgtggggagggccccagccttggcccccttctcctgggcagtgagcactcagttgcttcctgccccacttagtcaccagctgtttgccaggcactgagcccctccccttcgggaagacaaggccccctctgtatgggctgtggcctggtgctcctgggagctgggaggagtgggtgccagctctagggttagcttgaggggtggccttggggaagtcccttcagcttcaaagccttgtcttcctcatgtaacatggggactcaactctggtttccaaatgtttgtttttagcaacaaaacccattttttcccccaaaagcaatgtggactgatgcaatgaatgacaggagggcagagcagagctcctgcagggaaggtgggttgggacagaagacccccctccccaaaaccaaacaagccagtcaaccttgaactgccgtagaaaggagagggagatgggcgtggtgactcacgcctgtaatttgggaggctgatgtgggtggatggcttgagcccaggagtgtgaaaccagcctggccaacatagcgagactctctctacaaaaaatacaaaaattatctgggcatggtggtgcatgcctgtagtcccagctacttcaggggctgaagtggaaggattgtttgagcctaggagttggagaccagcctgggcaacatggtgagactccctgtctctacaaaaaaaaaaaaaaaaacacaaaaaaattagctgatcatcatggcgcatgcctgtggtccctgctactctggaggctgaggtgggaaaatcacctgagctggggaggtggaggctgcagcgagctgtgattgcaccactgcattccagtctgggtgacagagtaagaccctgtctccagaaaacaaaacaaaatacaacacagcacaggagaggggaagttttttggtttacctaactggaaaggggtgaggagggctttggccggccaaatctaggcgttgaaactgcccgtgagtgttgtttctttgcctcttggctctgccctggcctggtttttgacatcctcctcctggtagccgtcagtagtttcaggtcgagtcttttggacaccccagtgggaatatacattctatttttttccctgattgttttagaactggcttgggaaacatgcccacctccatcactgcgtccagagggtggactccacgagtgtacccaccccaccccaccctccccagcctcgtgggttcccgccagagtcagggcagacagtggtctgtggggtcccgtgaccttgagggcccaaaggctggcttggcctccatctccagccacaggttgttgggggcgggtgtataacccaaaggggtggcatcaccagcagcaccagtgtggacacgagggaatgaggcctggagaggctgcaggggcctgtgatcagcggctggtgagctgcagagctggtgccacctggccttcccacaccaggccatcaggatggtggggcacagagagggaagttgggggaacaccgtgtggtgtaagccatcaggatggcagggcacggagagggaagtcgggggaacaccatgtggtgtaagccatcaggaggcggggcacatgtcccttgccagtgctggtggtgacagtgacccgcagtcagtccctgttgactgagcactggctgcgcgtgctgacggcctccttgccgcatctcgtgccatcctcacacccgctgcgaaggcgggtgtgcgtgcagtcacccctttacagaggaaacaagttttggcaaggccagatgcctgcctggatacccaggtttccaccctaggcggctgcgctccaggtctccactgctgagctgaatgccgctttcccacccacaggggccgagccaacccccagctgggagcatgtcctcttcaccgcctgccacaaccagcacctgcagctgcagcccccccgccgcaggctgcactcgtgggcggacgactggaaggccattctggacagcaagcggccctgctgagctggactgtgcttcgggctcctctgtggggctctgacctcagggctcccagctcggggcctgtggggccagtatgctggtctgggagtccctcctagactcctgggccccatgacctcctgctgcatgtcccttcccttccccagccctgccaggccttaacctgatcacggggcagggctgggccctctgggcgcttggacatagacacgtggtcccaggccgttcagcctgacctcaggcagcaggcaccaagctgccagaagcccaggggctcaggacagggaggagttgaggccactgttcagggggctggtggccgtctccactccctaggcaagttctctgaggcagaagggggttccctgttcccagagtctgcagccatcagcaaggaggaccaggaacccggcgactgaggtgcttccaggtggggacaagcccctcttggtctcagccacagcaccccttattccagctgccctgcccaacctgctcaccccacatgaccttctgtgtattcagcaaacactcactaggtgacagcggccaccaggctctgtgctgggggacgatactggccctggcctcgaccagcttagaggtttctcacacctctgttcccagggccccgctcagggcccagcagagagtccgtaggcttgaacatgtgttgagtgcatgaaaaataaatgctgttcatgtgtgtagctcaaggctgtggcctgccctaagatcctctagcgtctgcccccactggggacccagcttcaggtcttgtaagtgtctgggcagttccactgcattgaagacaggcggaggaaggcatgacttcagcccatgcctcgcagggtgggtcctagtggtggtctcctcgggccacccacccactctcgttggtgagacttaggaggtgggtcttagtggtggtctcctcgggccacccacccactctcattggtgaggtttaggagatgggctccagacactcggttgctctctcaagtgcctccttcccgcacctgccccagtgcttcagagcagggtcccccgtccccctctcctccgctcttctcccaaggccaagtttctgtgggatcgcaggagccctgtggggaaggctggtgttagagtctcagcttctgttccttttgacccgctgggaagtgacagcttgaaccagccacctccccactaacctttggagaggttttgggaccactttcttgtccttatgcccttcccgttactgctctggccgctctcccatcatggcccttgaagggaacatgggttgcccatgcccctaattcaccccagctctggggccctcctggcaggcctctctgccttatatgacagagatgctttgggctgccctggaggcagggtcagataggagagaagacaaggggaaggcacccatggcccaaggttggctgagctttttgatgttcctgttcttatagtctcaggagcttgggctccatcacccaccttagggagggaggacccctccaggctccatcaccccagcttagggagggaggacccctccaggctccatcaccccagctaagggaggaaggacccctccaggccccataaccccagcttagggaggaaggacccttccaggctccatcaccccagcttagggagggaggatccctccaggctccgtcacccaccttagggagggaggactcctccaggctccatcaccccagcttagggaggaagaactctaggcttggccaaaggcagatctccacggcacccccacccccttacccgctgaactgacatttttctttggggtgaaggggagaggctgaaccaggaatatatttggggttgcatcacatgatctgaaaccatctggtccaggcagggtggtggttggaagagtcctggctgtcttgccacatggctctggagggaagtctgaccctggggtgctggctgcccagctgctcctgagtccctctgcctcttcctgctgtctgaggtctcacctgtggggccctgaaagtccctcctcatgaagggccaggagaatgtgtgatgtgcaactcctttcttgtccccagcagggcctgtccacctgctccacgccctgtcctgagagggactgccccatcagaagactcgagtcacagggactctcctggggccagccacaccctgaaaacattgtgactatagcttggggtgcagaaaacaacttggcttgtttccatcctgggggtccttctgatgacagaaactcaatcctgtccagattttctcagccacatcctggtttctccctccctcctcctgcccagggagagccccgggcctgggggctgacttggtgcaggggtgtgggtcgggttgctgagagcagtgttcacggaccccgagggagctgtggaggggccctgaggccttctgtccacaaagaggggagcagggcctggtggggtaccactgggggacattccctcctgcctcttacaccagccagggaatctttgttgagtctagggcagggcagggctgggcagtctccgtcagctcctaaccaagcatccgcaagagtaacatgctctgaatccttcaggagacggactgttgcgaaaccttttagactgataattgccatcagttttaaaggtcagtttaggaactccatgctccaaattgccacatttgttctctgctgttatcatcactcaccccgaggtgggcagctgcttcagccacataatttatttaaagaaaaaaaaataattgcaggggcaaaaatgtttcagaacatgaccccacccgacggtctcaaagcaacttgctgtgacgttaacaagcacttcgaggggtgcctggggctgccgaggcactgtggagcagcaggaggaggccccgggggcctcaggtcccagcacggtctcctatgtggaagaaggggccagcccctggctgagacgccctgcagagacccagggctggggggagcttgctgaggtggaaatgggaagcaggcgttgatgagtgaggtgccgtctgcacctggatgctcagccggctgctgccgtccccattgcactgaccttggctgagaccccaaattcatgatcgtgtcaacagtctcctgattgaggccaggcgcagtggctcacgcctgtaatcccaaaactttaggaggctgaggcagatgaatcagttgaggccaggagttcgagagcagcctggccaacatggtgaaaccctgtctctactaaaaatacaaaaattagctgggcgtggtggcgggcgcctgtaatcccagctactcgagaggctgaggcaggagaatcgcttgaacccgggaggcagaggttgcagtgagccaagatcgcgccactgcactctagcttgggtggcagagaaaattccatctcaacaacaaaaaaattctgattgaaatgaaggtcactttcttgaaagcttgggaagcttgtgttttgcctcagaaccagtttttgaaccccagaaaagaagatccacccccgttaggagagctaggcctggttctgccccatggcacatcagctctatccctcccttatccaccaggctggcctctcagtgactcagctctcggtgaaagttgtgattcatttgaaaatattggaaagattcagagctctaggaccagagcccctggaaggggtgacatcccccaggtggagagggcgctgggaaagcaggtttgtggagcatgtaggaatcgtggccgcacgctcaggtatgtggggaatgtgcccctgtttctctgtcctgccagagggtggaggaatctgactcccctacctgctcttcagcagcggggcctccagcaggggggcctctagcagaggggccttgtcattgtccccatgctgctcccccttggcccttcatccctgtctgtgcagggtgtccatctgtcctcggtgaggggccactgctgcctggcctcgcccccaccctggggaccctgctgaggatgggaacactgctcctggccctcagacctctctggggtttgtggttccccgagcctggggttctgaccaggggtgggctgaccacaggtcaccttctgagggacccctggtatctcctgcatggactcctcgagtgcctgagcccagggggagagcagcctgggcctgtccagggctcactggcccaggttccccaccctaggccagctcttcttgacacatgtaggctgtgagtcctcaccccgtggggtcgtcaggccagatgaggccatgcatgtgaggaaagcttctgatccttctccagtccacggcagtgccattcccacctgtgggggggaggaggcaggctcgggaggtgcagttacgttcccgaggccatgcggcgttcgacctgggtcagccttgctcagtgtttctcaggaggccctccttttgtccacgtggccttttcctcagacgtttttgtgaaggacgatgtggcagagcccttctggctgggccctctacccgtctccaccccagagggcccagggactgcgcaagctgctgatggggacccccacactgagcggggtgtcccatgcctaggaaggacagattccttggccagcgttgctgagcctctgtcctgtcactcacccccttccaggctccgagggatgtgaggacttcagaccacacacttcccagggcacatgtgtcgctggggatccctcatcagtccatttgcacctgtgctgtggggagccggtctctgctgcacttgggcagcccgccccggcggagggcaaccccttaatgagccttagcaggtggcatgtgggccagcgtgtcccagcacgagacgttcttgtgctgggtcccttcagctttagcctcagtgggcaattggcccaagtccctggctgcttccccactgcagcccctacccagcttgggtggggtcctcactgcccaccccgccccccgccaccttggcccccttccaggttccagacttccacttgcgtgtgtcagaaacgcagctcaaacccacccatgtgcacgtgcgcaaagctcgttggcctgggaggcccagggcacgctcacccccagggggtcacacagtctgaccaggctttcgcgtccttcctgctctctcactgcactgtccgcttctgcttcccagcctgtggacgctccctggagggcagagcagctggcacaccatgcccatgctctgagcgagcagctgagctctggcccacagtggttgcagatgatgtcgtagaaagggcccagaaatagcgaggggtggtggtggcggcaaacctggcagcagagcctgtgacaagtgcagtgacgcctcacagcgggctcagggggtgggtggcctggtctgaagtcaccataagcagaacaggcttcgcaccaggacatccgggtcaataacagccggccccaggctggcgatgactcatgttggaggggctatggccagtgccgtggaggacaggcgtgggagcagtctcaccagattaagtttacttccagcatttgggtctaaaccctccaatgaacagatgggctggggatgtggcctgtttgccgcaggcgacagaggctgctgtgtggcgagtactgcggcagggcctgctctgcgtcccgtgcaccctggggtggcactaatggcacttttcagccctcgggttccatcacgtggtcttcttacatgggctgctgggtggtcacggggcggggggtcacatgactctgtaaaatgtgtcctcattcacgaggggcccaaatgctggggagggagggaggcctggggcagcccagccaggcagggaagctcggcggcaggagccgcagcccagggcagaggaagggtggctgtccccccaactcccttcccaacccccctgcagacctctatgctctgcttctatgcctgagctttagtgggggtgtttttttaaattgcaaaatggacattttaagggcatctctctctgagtgtccggcatatagatgcggctcaatggatggcagccgggatgaggatgacgaagcagagatgaagggggcacatgtgtgtgcaccatacacacacacccgaagtggtgcggactggagccctccaggctggcctcgggcttgaaggcagaaagaccatggggtttctttagttttctgggtcaggattccccatttgttgggaccacatcaagcatcaatctgacaatagctgtttccttagtgcttactgtgtcccgccactgtgatcagcacatttcacagccacagaaccaccctctggagctgttcctggttagggatggcacgaaccatctctgtgtggccaggcctgctggggctgccctaggcggtggccatgctggggctgcgcttgtggcctcctggcactgtcgtctggcctggcattctcttggggcccaggtgttcctgggtaaagcagggcctggggtcaggagctgggcttccatccgaggtgggtgccagatgctcagcttgcagcaaaaccacaggacaggcagaaagggtcaggccagagcaggccaattcttagaggccagaggggcaggcccagccactgaggtggcctcagttgtcagtcttggggccaaggagggtgaggagaaggggatatgagcgaattgatcttccaccgtgtgactggcctggcgcttacatatgcaatggagacagcactttgtagacaactcctgttgcctcagttttcttccctgcactcctgccaatcaggccaagtgatgacccccaccaccccatgggaaggtagggcaggtgtcatccaggacaggaagtccatggggtagggaggaaggagatgacctggggaaaggtcccactagactgtaatctgcccctggtcctaggtgggaggagagcctcggaggggccacgctgttggaggatgagccagggccctgggaagtgacccccatttgtcttggttcaatagtagttgtatgtgttggggggtatgagcaagagaacaggaatcccacagaaaccccagctggtgaggggctggttctgcatggcatgagagaggttgagcaggtgagccccaggtagagccccaaggccccctgctcttcctcagcctggaaaggaaaaatccaggggattctgtgtgcttgtggaggaaccacggtcaagaactttggtgggcaactgcctgcttggcgaagtgagctggggctgagggctgcgggggaccatgcggtctggggtcagatgggagctgcagccagacctgaggggctcagagcacccctggggcccaggctgggcctcaggagcaggcccctcgccgagcttcaggagcttcagcaggcagggcggaggcccacccggcgaaacaaggcagcacggccaggccctgaagcagaagccagctcctggatccagatgtgcccgtggcagggaaggaaatgagggagaccctctcaagcacagagggatcatcagcccctccagggcatggaaactttgaacgactcaatgcttccccgaaagagcctgagttcaaccaaagaccgctttaatggaaagactgagttcattttaattggcaattaaaaaaagtgattagttgtagttaatagggaacagttatttgcacatctgagtttttgcatgtgcacccgattctgttacacctgcgcctcatttaacccttcctataccctgcatcatggtgtcaaccccaggaaaccaggactcagagaggctcattggcaagccccaagccacacagcaagcaaggctggggtgggagctcagcccccagagtttgcttcagaggagagagggacaaggagtctgcaggacagggcctggcgctgccatcgacttgctgtgtgactgttctctgagccgacttcctctgctgacaaatgagagtgggtcagcatccatgagaaagggttgaaggaaatagggacatttattccagaatgttgctgcttgattgagggaactgacttcatctgtaaagcaaggcggtgggctcaggggagggagtcctaaatggggaagaggggccttccacaggaacttggagtccttccagggacattgtcctggtgtggccaccaggtggcagcacagcccccttcaaatgactgctcgcgcgtgcttatgatggggcgtgcatgggtacaggcagctgtggggaaagaagggggaagggccccattccctacctgctcttcttgccctcctgggccagctcttcttccccttacgccccgggctgctgtggacaaatgtctgatgggcccagggcgccagccagactgaggacccgtgagcagcctaccagggtagggggctcacccttgaccagcagaaaccttcttgtccccagccacaaacctcaagcatgcactaccagcaagaccttaaggaggcctgaagaggaaagtcgctctgcttccaagccagggctttgtgcaggtttcagctgggcctcgggctgcacctctagcccacccacagctccctgtcacgttggggatgaagtgggatctccttagcttagcactggaagaagacccttcaggacctggccctccccatctccccggcgctcggggctcctggggctcttcgcatgcctctctcctgcggctttgcacctgccgctcacctgtctttaccggcgctttctgcacaagccctggctctgacttccctgcagcagggaggcagtgtgggctgtgtcagcagcagcttttgcagtgttacctttatccagagctgcccaggcctggggggctaggctgagggtgccctgcggctttggagagggagaggctgggtcttcacgcgctacagtccaaaaaagactcttttcctctgggctcttacaggccctaagccagtttatgccagggctgtaacaagatgactcttaagggtagaaatatgtacaaatagtagccaaattgcctgttcaggaatcgtctctgcccagttggcaatttggataaaattacaaaaaaaaaaaaaaagtccttgattagatttggcaaggctggcttgtactcacaggtcggggcctaaaggaacccagcaataatcagtctccttaaaatttagaaagaagcagggctgaggagatgcaaacaggctgtgggcagaaatcttgtattctcaccctggttttctgctactcctggtagttttggctccttggagaatgatcaggcagtggtgtggggctgcaattcacacaaatggccactggatgatgccagaggaccggctctggatgcttaagtcctcactgcctccctggagggacctctcttggggcctgcagtcaccacccagaccagacctgccccatgttctggtcccataaggatgttcctaatgatcagcatctctttctgaccccaggcacgttctggaagctcctgtgggcaggccctgggggcctcaaccacttggttggccggggggcaagatgaatcaccagagctgtgacttcacctaaaagagcaaagtgctgtgggcatttgaggcctcagagacagactggggggtggctggggttttgcgcaggcctggctaggaggaaggcaggtgcccaaagacatccatgggtccctgttctcatggtaggttccatttgctgcaggcccctcccatggtcccagcactgagcgcccacacacgccagaggttgcaagctggcagccctcagaagcactttggcggctcactgtattttttcagggtacttttatatcctccaccgcaagtcctcagaaggtgggcacagacggctgggctggttgggcagtaacctgactaagcatcctgccccaggattcagtccccccgccctcagacccagccctggtcccaggtttgtcacctcctggccccctatggcatttgagaccctgacctctgcctaaacaaagcagacgatggttttccctgacattcccacacctcaccttggtctgtctttcccgcctgcccccacctccagcctgaatctcttccttccctcaccacttatttcaagcctgttcttccttgaaggccctgcccgcctgtcccttccgccaaaaggtccccgacgactccagccccccgggtagtctatctcttctgtcccctacaggactcactgcctagactgctaactgcaaacagacaccagggaaggagttgactttctacggcggtggcaagggagaaatggggagaggatcctacatatattgagcagatgccagacacttcatcacgtcatgaatcctggtgaggatgaaataaggtccacatagacgttttctttgtttttgagatggagtctcactctatcgcccaggctggagtgcaatggtgccatctctgctcaccacaacctcagcccctcccaagttcaagcgattctcctgcctcagcctcccaagtagctgggactacaggtgtgagccaccacgcctggctaatttttgtatttttaatagagacagggtttcaccatgttggccaggctgttcttgaactcctgacctcaggtgatccacctgactcggcctcccaaagtgctgggattacaggcatgagccacagcgcccagcccacatagactctttctttctttctttctttcttttctgagacagtctcgctctgtcgcaaaggctggagtgcagtggcacgatcttggctcactgcaagctccgcctcccaggttcacaccattctcctgcctcagcctcctgagtagctgggactacaggtgcccgccaccaggcccggctaattttttgtattttcagtagagacgaggtttcactgtgttagccaggcttgtctcgaactcctgacctcaggtgatccacccgccttggccttccaaagtgctgggattagaggtgtgagccaccgtgcctggcctagactctttcaattctgtgaaaagtcatgctgagaaggtgcagtccaggctcagcttgactccagggctgatgcccagcacctcaggctgcagagattaagatgcccagaggcatgcaagaaatagaaagggatggggtagcaggtgactcacactgaagcctcccccatcatcccaaatcctctaaggggacaaaaaatatgtttttaaaattcacaaccacattgaaaacaagactggtgcgcttggttgaccagacactatgctgaaggccttaaaggcagaagaggctggggccaatggtgggagggggctggctgctgcgaaaagttggggccactgtaggcccctgggccctgatgggatgattgttcaaggtactcagtaggagccacaggtgaattcaaccctcttcctgaccaccaccaccacacacacacacacacacacacacacacacccagaccaagcagataacacaggtatctgtgttttgagggagtggtcatcagaagtaatgtgagtgcaaggcttgaaggggcaggcactgtcctggaaggctggtgtgtttagggagaatggaggcccccatgcacagaacattaggtagtggctggtggtgcattctgctaccccacgagtggggcaggctgtgggagagagctgtgatgcttgcagattggctaaccatgaacttcagacacagagatgagcctgtgaatgacaggcagcaaactcctcaatgagagaattgacacccaaggaaagggagttaaggcaccaggatgaggacttagaaaggtgtactcagtatccctggagagatgggataggctattggatccccaaaaaaatcaactagagaatctagaaagttaaaatctggtcattgaaaaaactccataaatgggatgaatagcagaatggacacagctgacgagcaaagaaatgagtaagaggattgagttaaggacttctagaaggcagcatgaaaggacaaagagatggaaagcacagaataaaagttaggatacatggaggacagagtcaaagtttcattttctggtcccagaagacataaccaaaagaatgcaggggaagaaattttccagagctgagactggcaatgtcccagaactctgccagtgcctatcaggataaatgaagagggagcctttgctggacagacatgttgaaatttcagaacactggggataaaaaagactctaaatatttcagactgaaaacagacgacttgcaaaataatggaatacaggaagccagaaaaaaagaagaaattatctttaaaacctgaaggaaaataatgtctaagacgtttagcattgataaaattcctttttgaaagaattgttaaatgatatgccctagcaagaagaaaaagtaatccaagaaacagaggctgagtgcagtagctcacacctgtaatcccagcacgttgagaggccaaggcaggaggattgcttgaggccaggagtttgaaactagcctgggaaacatagtgaaaccccatgtctacaaaaagtagcaaaattggctgggcgtggtggtgcttgcatgtagtcccagcaacttgggaggtttaggtgggaggatcacttgagcctaggagtttgagcttgcagtgagctgtgattgctccactgcactccagcctgggtgacagaggaagaccctgtcttaaaaaagaagtggaatacaagaaacaatgatgagcaaagaaaccaacaaaacttattaaatctaagtaagtgttgattgcttgaaaattaataacaatctgcaactaaaatattagatattatcaatttaagtgttgaggagtttgtggagcagtagagagtaaatgtgtgctgaagctcttgtcttgatagagagtggatatagattctaattaactgtagatattcgtagaataaggttaagtatgtatgtgaaaatgtaaagggaaatctccagaaaagtagaagtagtatgtataacttataaactattagagggaaaaactgaaatgggaaaaatgaagtcaatccaacaaatatcaggaaagagatgaaaaacaaaccatgggagatagaaaataaaaacttatataaaaggaataagatcaaacatttcaataatcacatacaataaatgtgaatgggttaaattcacctattcaggagtctccctagaccaaaaaaaaaaaaaaaaaaaaaaaaagaaaagaaatcctgccttcaaaaaacacatataaatcctaatgacccaggaaggttctaaataggagagtagaaaaagatataatttataaagtcctaacaaaaagctattggtaagcatacatcagtatcagacaaaacagagctcaaggcaaaaacttgattaaaaaaggaaatctgaattcatgttgctaagagacaatctaccagcaaaataaaaatgatgaaatcttatgctcttaacatagtttcaaaatatttaacacaaaaactgatagaactataaagagaaatggacaattttacaattagagcgagagaccttaatatatttttctcagaaattgacagatgtaatacaatttctttttcaaactgttcaaatctatataggtcctataggttttttgtctagggagactcctgaataggtgaatttaacccattcacatttattacatgtgattattgaaatgtttgaacttattccttttatataagtttttgttttctatctcccatgttttgtttttcttccctttcctgatatttgttgggttgatttcatttttcccatttcagttttccctctaatagtttacaagttatacgttctattttcatttttctggagatttctcttaacattttctttctttctttctattcttttcttttcttttttgcttttttttttttttgagatggagttttgctcttgtctcccaggctggggtacagtggcgcagtcttggctcactgcaacctctgcctcccgggttcaagtgattctcctgcctcagcctcctgagtagctggaactacaggcacgcaccacaatgcctagctaattttttgtatttttagtagagatggggtttcaccatgttggccaggctggtcttgaactcctgacctcaagtgatttgcccgcctcagcctcccaaagtactgggattacaggcgtgagccaccgtgcctggcctccctcaatattttcacacacctacttaaccttattctaccaacatctagaattaatcagaatctatatccactctctaacaagatagatagatagatagatagatagatagacttgaacagttcaaaaaagagttattttcagatatacatggactggttacaatattgaaatattgaaaaagaggagataaagttagttgttttgtagacagtatgattatctcattagaaaagaaaaaaaaaggacaaatgaagagtttggcaagcttggcaagcttgttggattagaagaacaaggtgcaaacaccattgcttccctggcagtggaaatggggatgaggatggatatgagagatggcatttggaaggcagggcaacagggcagggagagggaggacagaggcagggaaagggaggacaggcagggagggggaggacaggcgcggaggggaggacagaggcagggagggggaggacagaggtagggagggggaggacagaggcagggagggggagaagagaggcagggagagggaggtgaaggctgggagggggcattctttgggaagattgcagagtgtgggcttgccaacattcattgagtgccaagcatctcctaagtgatgtgcatgaatgatctcatctaatccctgaggtggctgctattaacacacccacttcacagatggaagaacctgagatgcgcaggcatggtgagtcccagcacggccgggatttgggctttgggccctctgacgctgcacagctgctcttaatctccacgtcataaatgggctcttcactctgctcagggtgctcttctgggaagagtgtggttggtttttctaattctcaaagaagcatgtgatccaggaaatattaagaagcactgcctcacacattgggatatatcccagcattgggaacatggggtctgagggcctggcgtggggaggacgctggctgctgtggcccgggggacggtcctgggatagcctgtgctggcagttccaacattcccatgagtcagcagaggacatctggttccaggctctcggacaagaagagagagacccctggagctgccctctctggccccacactgtttttgagacaggcatctggagcccagagagggggccactcacccagggtcctgcagctgggggtggctgaggggctgggccagggagaggccggacacccctgccatggtcctaccccatgctgcctggctgtggcagcccagctggccctcccccagcccctcatggctgagaaaaccccctttctcctccccacagcgtgactcccaggaaggaagagccagcacccttccacctagaagcctgcaaagcaccagcacggccggacggcttcatgcagcctatggccaggtggtgtgccttgggctgattttttttttaattgtggcaaaatacatatttactatttgaaccattttaaaatgtgcaattcagtagcattgtggtcattcataatgtggtgtgagcagcaccactgtcttgttccagaacttcaccactcagacccaccagcgctcactccctgtcccctcccccaggccctgcgccaccctgcttattcataggtttacctattctggacattgcgtataaatggaatcaggtgctctgtgggcttgcgcggctggcttctgccacttaggatcatggagtcgaggttcattcacctggtagtatgtgcctggcctttccttttagtggctgaataagatttcttttcttttcttttttttttgacacggagtctcactctgtcgcccaggctggagtgcagtggcgcgatctcggctcactgcaacccccgcctaccgggttcaagcaattcttctgcctcagcctcccaagtaggtgggattataggcacctgccaccacgcccagctaattttttgtatttttagtagagacggggtttcaccggccaggctgggcttgaatgcctgacctcaagtgatctacccgccatcactgtggccctgggtcagctcctagctggctcctgctcccacccttgccccctagggtctgttctcctccagcctaaggcaactgtcctccctcctctgctcaaaaccctctcatggctcacactttactagggcagaagcccaagtcctcaccatggtcctcatcgtttgtccattggcaccgcctcttgggcctccctgctcccctccaagctcctgtgcctgttctttcctctcccagacactcttcctcctgaccctgtgtgcaagctcagccctctcatggcatctctaagtctcaggtctctcaaagagcctcttctgcttaaacttggactgtcctctcctgagcccttccttgttgactcactcgttgccacctcctaaggaagggaggaagatttaaatgggacatgaaggagcagtaggaatcagctagcccggggaggtggtggtgatggggaagaggggggttgggcgtgacaacccagggcaggagggaggtggccttggagggagtgagcaggtccatgaggctgtgcaagcagccaggggcggggcaggtgagagagcaggcaaggtggcaggggctctgttggcctcgcctgtctccgcctggccctcccctgtggcttcatcttgttatggcatcttgggtcatcagcctcctgccacagtgatgcacacaccctgttcccctgttcctgggtgattataaacaccctcaaggtgacagcccgcccttctcagcctcgtctgcaccctacagagtgagcacctgcaggatgggtaaataaacagctgtgagaaccaaccagccaatctcacaacgaggggaaacccagggttaggcaaggtcaaggaccctgtagcccttttgtagccttgaactccagggaggggtagggcagccgcttggttggggcaaagtgtgtatttgaaggagccaagcagcaggaagaaagagaaagtagttctctatggctctcctgggaagtgaagcactttgaaaacttggagggcttcctggaagaggcaaacccaaggtagctggcccatctcacctcactggggaaattctgacccatttcttccagatcccagagactcggcctaggtcctgctgggcctggacactgtaccctgcttctcttcaggcagggcctcccttccccagattcccaggcctggaggaagccacaggaagtggaacgaggcgccggctctgtgtctgcttggggacatgggttaattaatcaggctttgccctttcgtggtgctcttgtaccctggagctgaatattcaggctggctccctgacttagctcctgcctgcgtctgactggctctatttttaaagcccagaggacagctgacgaaaacgtttaaaaagaaaccaaatgtttaacatgtaaaagcctggtgcctctgttttgttcggaaagcaggatgacatgcgttttgtccccatccccgggagggtgcagcgttttgcagcaaggtcagggtcccaggaaacccaagtcaggccccagctttgccacttacctctgtgtgaactttgccagcctccttctcctcctgtgcctccgtttccactatgtgaaaagagaagttgggatgagttggattcccctcattagactttgggtgattcaagagccgtttttctgcagggaatgggtgtggtgggggcaggctccctcctctgttccccacctgctccttctcatttcatctggctaattcccctggaaagctccactttctaactaggaggaagggtctcctgcaagcccttcgcaaggtgttggggaggtcttgggaacagaagttggcagcccttgtctttaatctgcagctcacattcagggtcacctgtgccaggcatcagttttaacatattttattttattttatttattgttttttgagatggagtttcgctcttgttgcccaggctggagtgcaatggtgcgatcttggctcactgcgacctccacctcccaggttcaagcaattctcctgcctcagcctcctgagtagctaggattacagtcatgcaccaccacgcctggctaattttgtatttttagtagagacggggtttctccatgttgaggctggtctcgaactcctgacctcaggtgatctgcccgcctcggcctcccaaagtgctgggattacaggcgtgagccaccgcgcctggccttaacatcttttaaaagggggagtggcagtgccctcctggctcacctcacacagctgtagcaggaatctaatgtcatggtaaatgtatgtggttgatgacacttggagttccttcagtgccaccaattttcaagtactctaatccagatactaactgaacacgtaccagtaccaaaaaaaacccattattgacatgtagggtggggccaactacgtaggcaacatgacttctgagctagtcccagcaagggacagcagtttgtcatgcaggccgctggtgcctctcagttctccatcacggggcagagggggcacctcgaggatgtggcacagggttcacccccacagggttcctccttggcagggtgtggtggccgcagtaatctgtctagcccatatgtcctctgcacatggctctgtctctccccttgattctgggaggatgtgtaacttgctgaggagcaatagaatgtgagaaacaatgcagcttctgcttggtttgctgaaatgccacgtaagcaggccagctgctcgagctgccatgctgtgaggaagtccaacaagcccacacagataaacatcaggaggaagagatgccccgccaggggctcagaaccgcaaacgcacgacagactgtttggctgagccctcctgtaattccttaggcacaaaaattatgagaaacaatagtgttgtctctgctgctaagttttgcatgctttgttacacagaagtagtaactgactcagagatggttggtgcagacccaaggatgggtcttctctcagaagtcttggctgtggtccagagttggggttgagattttggagtggagtagcttggccaatgaaatgagcacagaagtgaccgatgccactcctggtggaaaagcctgtgtgctactctcttgcctgctttggcaaactttgaagcctccctttgagatgggggtgtcttaagatggtgaaacatgttagtttgagtgggtccctgaagatctgcaaagagagaaaccactcccatcaagccaaaccttagtggtattaagcccttgagatttgggggttgtttgttactgtagcttaaagtgacctctcctgactgatacatgatacaaacaaataataagagtgaaatgtttcccattttattgttgagagactgggatatcgagaacattcagttaagcattagctcttattataattccaattcctgtgtctaaatggagaccctgagatgtggagttgaatgcaagaagtttgtttggaagctgattcctggaagcactgatggtgaggtggagaagtgagatggtgaaggaaaaggaatttgattactgggtgcagggatgagaagcttactgctgtgggtaactggggtttggtccttctggggatctctgggagactgtgcacagcatgcttcaggtgatcccagcccagaggtacgggagctggggatttacccatctgcttccatcaattgttagttgagggctgctcctggggtgtcagctgtcaggcaggccctcgggcttgccctgggcacacagcagcatgttctttggccaggggaagtcttcgggcagaggccctggctttgcagggaggagctgttggtgagaacagactttgcctgctctgggagtgcgggggaggcatcctactttacagatgaggaagagagctcttgggagtcatctgtgccacagccttagcatgacccctggcccttccgacttccgggcttacgttttggatcgctgagcctcttggtgggaaaagcatagaacaccaggacgggacctcctgtcctgagtctcagctcctggtgggaagggactgcgtctcttttgctgtgaccagcagctctgcatctgtggaaatgtcccgcaggggagcaacccaagacccaggcgggctctcagggaccctcgtgggctgccagctggacagcagcccaagggtttgatgtggggctctcttccttgctgtgtgagtctgggacctctctgggccctggttgtaatatgtgaccctgctttgcccagaatttgtgcacagagcagatgacatgctgggtagaatgcgaggtactggagccactgagcacagagctgggatcagcgcagcgttctaatctgtagggcagtcggcacggctgacaggcaaagctgccaaggctcagcgagggaagggaggccggaggggctggggtctggggcacactctcgtctgtcctccgtccctggaggtgtttcctctccccagtccctgtttgctattgaccccctggcatccatgcattaatcacccgccatttggacacatttatttagtaccttctaaggccctgcaggaggaggagtcaagtgaggcttcaaagagacgtataattgaattaggatgaaaagcatagaaacacataactcagggctcagaaatgcattttgattgacggagcacagagtcttgccgagaagttgctcctatgcttgaagcccccaagggagggactttgcctgccctgggatgagaatctacaccctcccgatcaggtttttggattttagggatggaaaagaaaaggtacttggagacatcccagagaggcctctgaccgagatgatggcgaaggcaggaatagggctctggtgtctccaagactgagccaggcagggctctgggggccttggagactgtgggattgatgctgctgaatgccaagagacactggggtgatgtcagctggacttcctctctggagggtcaggactcacccacgtggtgctggacggccaagctctcattcattctgtgggtctgagagggcaggagatcccacaccactgactgggtgagtgactgctcaaatgggatttaaaataacttcaggcagggcactgtggctcacgcctgtcatcccagcactctgggaggctgaggttggtggatcacctgaggtcaggagttcaagaccagcttggtcaacatgataaaactctgtctctactaaaaattagccgggcatggtggtgtgcccctgtaatcccagctacttgggaggctgaggtgggagaattgcttgaacccgggaggtggaggctgtagtgagctgagattgcgccattgtactccagcctgggcgacagagtgagaccccatctcaaaataaaataaaataaaataaaataaaataaaataaaataaaatgacttttaaaaaataaagaggtatgaataaaaacaaaaacaacacactgaagcttggggaatgcagcaaaagcagtgctaaaagggaattttcgacctgttaaatgcttatgggaaggcccggcgcggtggctcaagcctgtaatcccagcactttgggaggccgaggtgggtggatcacgaggtcaggagatagagaccatcctggctaacatggtgaaaccctgtctctactaaaaaaatacaaaaaaattagctgggcatggtggcgggtgcctgtagtcccagctactccggaggctgaggcaggagaatggcatgaacccgggaggtggagcttgcagtgagccgagatcacgccactgcactccagcctgggcgacagagcgggactccgtctcaaaaaaaaaaaaaaatgcttatggtgaaaaacaagaaagatctcaaatcaacaacctaactttacaacttaaggaactagaaaacaaaaacaaaaacaaaacagaataagcccaaatagcagaagagaggaaataattaagattagagcagagataaataatatagagaatagaaaaacaatagagaaaatcaatgaaacaaaagttgattcttttaaaagaccaacaaaaattgacaaaactaacaagaatgactaagaaaaaaaagagaaaaaacttaaattatcaaaatcagaaattaaagtagggacattactactgattttacaggaataaaaaggattataagaaaacgctatgaacacttgtatgccaacaaattggataacctagatgaaatggagaaattcttagaaatacacaaactatcaaaactaaatcacaaagaaatagaaactccaaatagacccctcactaggaaggaaattggctcagtaatcagaaacctcccaacaaagagaagtcctggattgatggtttcactgatgaattctgccagagatttaaagaactactcacacctgtaatcctagcactttgggaggctgaggcaggaggattgcttgagcccaggaatttgagaccagccttgtcaatatagtgagacctcatctctacaaaaagtttagaaaaaaaatatctgggtatggtggtaagtgcctgtagtcccagctttttgggatcttgaggtgggaggattgcctgagcccaggggttagaggctgcagtgagctatgattgtgccactgcattccagcctggacaacagagcaataccctgtctctctctctgtctctctctctctcttttaattgttttattagatcctgaccagctcacagagggaggactctcacccacattttacacacaaggagacaaactcagaggcagagccaagtctgcatgtccaggctctctgagggccacgccgtgccagcccccttccaccctggtccctggccttcgtgtggtgaattctgtgttatgaatggggccctctaagattcttcccacatgagaaattctgtgactccaagaatcaatatttgaatttctgaagctcaactgaaacccaaacgccagtgaatcatgactaacttttttttttttgagacagagtgtcactctgtcgcccaagctggagtgcagtggctggctcactgcaacctccacctcccgggttcaagcaattttcgtgcctcagccacccaagtagctgggatgacaggtgtgtgtgccaccacacccagctaatttttgtatttttagtagagatggggtttcaccatgttggccaggctggccttgaatacctgacctcaagtgatccacccacctcggcctcccaaagtgctgggattacaggcatgagccactgtgcctggcccctttttttttttttttaaagtaaagaaaatagatcaatcagaccacaactgaatacacaatttcctaaatccacaaaacccgagcctcacaatactttttaaccagggcctgagtgagggttagaacatcatgtaattttaagctttgcttaaaatctcccaggaaaaatggcttagatggcatggctcagacttctcctgtatatgcacctagaaatactgaatcgttccacctggaggtcttgcaggcccctccatctctatggggccaacgtggaacttgcctcttctttcgtctggtcaacaccagtcatgatttttggctggctggcatttttgaacccctttgtatgtctggggaatctccctcatgctgggccagaaatgtgcttcccagggccccttgcacctagacgtgcacacgggagctggtaggcaggacagtcactggccctgcatgaggatctgtagacaccatgtgagccgccctggccaggtggctgctgagacgccaagggtccagtggcaaccacagcatctggccccagtgctggtggtatgctcttctgggctgggatttgcatggacctctggctgcaggcctgccctccgggccatttgaagaccctgtgagctgactctatccttcattaatccttcacatgcctaaactgcctggcatgggttgcaaggaggaaccttgactgatacctgcctcctccccaagcttactcctcctctgtttccatcggaaacatccctccccttgcccaagtgtgaagcccagcagtcaccctgtctcctctctccctccccagttccaatcccccagtcttactgacaactctgcttcctacctctacagctctggaagtgtcagagacgtttgaaccaaagcaactccatcttgaataggagctgggtaaaatgaggctgaaacctaccgtgctgcattcccagacagttcaggcattctaagtcaccctttgtgtgtctgaggaatctccctcatactgggccagaaacgtacttcccagggccccttgcatctagatgtgcacatgggagctggtggggaggacagtcaccagcttatcatcacaggataagataggaggtcagcatgaaatataggtcataaataccttgctgataaaacaggttgcagtaaaggagccggccaaaacccaccaaaaccaaaatggcgacaagagtgacctctggtcattcaatgtttgggagccttgcacactcgcctggctccccacgtggcaatcattctgtctgccttcaggctcctgcacaagctgatgcttctacctggagttttactccactctctccctccttccacccctacttggccttggctctcagcttctgggaaaagtcatttccaaacctcccctcagagtagtcatctctccacagccctctgtgtttctgggggctgttaggcatggtggctgcctgctcattctttgacactttctttaacacttaggagctctgcagccctgggcaagttactgaatctctctgggccatctttatgtcttcatttataaaataaggtttgtgaaaggagaataaatctcaggatccccaaatcactaagccaaagggaaaagtcaagctgggaactgtgtcaggcaaacctgcctccattctattcctaaataagatggctacaaagattgaaaaaaaaaaagcctacatgccacattttctttctttctttttttgagacggagtcccgctctgtcgcccaggctggagtgtagaggcgcgatctcggctcactgcaacctccgcctccagttcaagtgattctcctgcctcagcctcccgagtagctgggactacaggcgcccgccaccacgcccagctaatttttgtatttttagtagagacagggtttcaccatgttggccaagatggtctcaatctcctgaccttgtgatctgcccaccttggcctcccaaagtgctgggattacaggcatgagccactgggcccagcccactttctttatcctaatgaatagctaatagatgctggtcttaatacctgagtgatgggttgatctctgcagcaaaccaccatggcacacgtttacctatgtaacaaacctgcacatcctgcacatgtaccccagaacttaaaataaaagttgaagaaaaaaaagctacatacctccctcacaacttgcccacaaggaaattccttggatgagggacggacagagctcaaagccatccttctgcccaccggagacaaatgcacctctgatcgcctcctttgccctgttgtttcactgagccagactaaggtatcagtgactattcctctaccctcctctcacaggtaaattgtgtattcagtgaaaggctaatcagagaccccaaagaatgcaactgtttgtctcttatctacctatgatctggaagtccctccccggcctcgagttgtccctgctttcaggaccgaaccaatgtacatcttacacatactgactgacgtcttctctctccctgaaatgtatgaaaccaagagtgccctgaccaccttgttgtcagaacctcctgaggctgtgtcacggatgcgtgatcatagcaccatcttagctccttaaccttagcaaaataaacttcccaaatcgactgagacctgtctcagatagtttttggttcacaggttcaccacatgtgcagcctccacccttctccaggctgttctggatgctgccccttcagcctgcatttccctgtctctggcttcccagcacagactggggatgggagggagggggatgtatctgcttgggaccggcctctcacagggtcacaatggggcagccctgggggtagtagctgcccactgctgctgccctttgggggcctccacgcctcttggctgttcccttacctctgcctagggcagtgcaaatgccggcaggcctgcttattacacttcgcttcattgctgtttgcagatactgcattgtttttacaagattggaggtttggctgggcatggtggctcaggcctgtaatcccaccactttgggaggctgaggcaggtggatcacctgaggccaggagtttgagaccagcctagccaacatgatgaaaacccatctctactaaaaatacaaaaattagccgagcgtggtggcgggcacctgtaatcccagctacttgggaggctgaggcaggagaatcgcttgaacccgggaggcagagattgcagagtgctgagatcgtgccactgcactctagcatgggtgacagagtgagactccgtcccaaaaaaaaaacaaaaaaaacaaaaaaaacaaaaaaacaagaacagattggaggttggcggtggcccagcatccagcaagtctatcggtgccattttttccagcagcgtgggttcactttgtgtctctgtgtcacattttggtaattctcacaatatttcaaactttgtcattattattgtgtctgttatggtgatctgtggccagtcctcttggatcttactattgtaattgtttgggggcaccataaaccaataagaaagtgaactaatgtgttgcatatgttccaactagtccaccaactggctgttctctgtctttttctcctcgggcctccctattatctgagacacaacaatatcgaaattaggccaactaataagtctacaatggtctctaagtgttcaagtgaaaggaatagttttgggtctctcactttatgtatttatttttgagacagggtctcggtctgttgcccagactggagtgcagtggtgcgatcatagctcactgcagcctcgaactcctgggctcaagcgattctcctgcctcaccctcccaaagtgtggggattacaggcatgagccaccatacctgatgtctgtcactttaaatcaaaagctagaaatgattaagcttagtgaggaaggcctgttgaaagccaagataggctgaaagctaggcctcttgtgccaaacacttagccaagttgtgaaggcgaaggaaaagttcttgaaggaaattaaaatgctactccagtgaacacacaaatgataagaaagtgaaacagtcttattcctggtatggagaaagtttgagcggtctggagagatcaaaccagccacaatatctcttaagccaaagcctaatccaacgcaaggccctaactctctttaattctataaaggctgagagaggtgaggaagctgcagaagaaaagttggaagctagcacgggttggttcatgaggaatgaaaccactccatattaaggaatgaaacccactccataacataaaagtgcaaggtgaagcagcaagtgctgatggagaaaactacagcaagttctccagaagatctagtggagatcaccgatgaaggtggctgcactaaacagcagattctcagtgaggatgaaagagcactctattggaagaaggtgccatctaggactttcatagctagagtacagaaagtcaatgcctggcttcaaagcttcaaaaggatagtataactcttgttaggggctaatgcaactgtcatttaccatccccaaatcctagggcccttaagaatgatgctagatctactctgcctgtgctctagaaatggaaaaccaaaggctggatgacagcacatctgtttccagtgtggcttgctgactattataagtctactgttgagacctcctgctcagaaagagaagattcctgctcattgacaatgcactgatggagacgtataaagagatgaatgttgttttcatgcctgctaacacgacatccattctgcagcccatggatcaaggagtaattttgacttccaagtcctattacataacacatatatttcataacaggtatagctgccatatacagcaattgttttggttggtctgggcaaagtaaactgaaaacctttggaaaggatttgccattctagacgccattaaggacatttgtaattcatggcaggaggtaaaaaatatcaacattaacaggagtttggaagaagctgatttcgactctcatggatgactgaggggctcaaaatttcagtgaagaaagtcactgtagatgtcgtggaaattgcaagagaattagaagtggagcccgaagatgtgactgcattgctgcaatctcatgatcagttgcttcacctgttcaacttgaacagatgaagagttgcttccttttttttgaaacagggtctctctctgcacaggctggcgtgccgtggtgcgatcttggctcactacaatctttgcctcccaggctcaagcaatcctcccacctcagcctcctgagtagctgggactacaggcgcttgccaccatgcctggctaatttttgtgttttttttgtagagacagggttttgcccattgcccaggctggtcttgaactcctgagctctagcaatccgcccgctctggcctcccaaagtgctgggattacaggtgctcgctactgcacccagccgagttgcttcttatggatgagtcaagaaagtgattccttgagatggaatctactccttgtaaagatgctatgagcattgttgaagtgaaaacaaggggtttagaatattacataacattagcagcagcaggatttgagagggttgactccaattgtgaaagaagttctttgggtcaaatgctgtaaaacagcatcacatgctacagagaaatcttttgtgaaaggcagagtggatctatgtagcaaacctcattgttgtcttattgtaagaagtcgccacagccaccccgtccttcagcaatcaccaccctgatcggttggcagccttcaacatcaaggcaagaccctccaccagcaaaaagacgatgactcgctgaaggcccagatgatcactagcatttttagcaataagtatttttaaattaaggtatgtactttgttttttagacacaatgctattgcacacttagtagactacagtatagtgtaaatataacttttgtgcactgggaaaccaacaattggtgtgacttgctttattgtgtatttgttttattgcgtcagtctagaaccaaacttgcaatatctctgaagtgtgactgtagtcactttgtaaatatgtcttctctgagccatctggggaagttctgtgttacattccagggctgtcaagaggattcagtaagagcacttttgctggcgccctagcacagagcctggtgcagcacgttttagctgttagtgcttttcctgaagcactgcacccatcagtctgcttcacaactgataattttctcatctgtttctgccaacagaccagatccgcaatgcggagacctttctctgctatattattagtacttattgaggagtgcttggttgacaagagcatgcttggtcgacaagcaatgttaatggtcccacctgcctgtttgcagtgccattgtggtgtcaggagtacaagaggcaggaatggccacaacaccccctgtgcagttgtctaggttgtgcactgcaaaagttgcctgccttgaggagcaagggtagctgagattagcctgggttcttcccaccaagctgtgctcccaagaaagaggagtctcctaatttgttcaaaggggctgcatgaactagtggttccttgggtctccactccccgacagaaagtttgtgatgcctaaacccagtttctattcatttatacaggagactctgtcctcctgcctgtgctctaccgcccggggcgccgggcacctcttttttatgagttgctctctgccttccagtaagccagcagctttccacggaagtgccttggcttgagagaggcctgcagaaaccagcagggacaggatctctgagaagttccccagcagcctgaacatcggagccactgatcttccagataaataggggcagacaaaggcgagtgagcagtgagctccagagaaaccagttgtgtccggccgcaaaaataatgtccctggctgcaaagtggactcaaaatggactaataggcaattagcaccagagtgcccctacccagcccggagcccattagacgcaggacggctttaaccaaatcctgtcttaaagagctctgttgagagtctccataatgtaagtagggccttaatggggaaaaacagcctggtgacgcaggtgaagagagcggttcttagtgggagcttataagtgggctggaggcagccgagcactattgaggtgctctgcaggggcaggtggaggcagaggcggttgcgtttcagtccaacctgttctggttagctctgttccagggcttccgcctatccccaaatctcttccatatttggagcccagaagggcaccaccgctgtggtgtaacctgcgtctccacctccgcccagggtggtcagatctggtatgttctggggactggaagcaggtgttcaggctccaggcctgcatgtgtctgtgacactggccttggccctgtgccttgagttcccttccctttactctctccctccctggtgaggcgagagtatggctgacatcacctaccctctgggcagcaccttagggtctcacccctggctgcctgcgggagccactaggtgagctttccaaatgctgatgcccaggcaagatcctgagattccaatcggttggtctggagtggggtcccagcatggggaccgtaaaagctcacccactggctcatgtgcacccagggctgagccccactggtccccagggcctgtcccgttcatgccctctctgctggttagccaggccctacagggaattaggcaggtgtaccttattagatcccatgcttgaatgagacacctgggtagcctcttagaccctggagcaggagccctcaagcgggttcccagactggcagcattggtgaaatgcagagtctcaggctcagccccagacctatgaactagaatcccgcaggtggggtccagccatctaagttttaaccagccctcaaatttgagaatcactgtgctagaatagtgacagaattatcaccgcagttcagtgcttttgaaactttaacatggacagaactcatctgggcattgtattaaaatgtagattctggggctgggcgcggtgactcatgcctataatcccagcactttgggaggccaaggcgggcgaacgaggtcaggagatcgagaccatcctggctaacacggtgaaaccctgtctctactaaaaatacaaaaagctgggcatgctggtgtgtgcctgtagccccagctaccagggaggctgaggcaggagcatcgcttaaacctgggaggtggaaattgtaatgagccgagatcgtgccactgcactccagcctgggcgacagagcaagactccatctcaaaaaaaaaaaaaaaaagtagattcggctgcagtctgagctggggccacagttctgcatttctaacaaggtcccaggtgctgctgcaggtcccaggcccacactccgagcagcgaggtcacaggtggagtcatcaagtgccttctgcaggctggacaccggactaagcccaagcttgggccctctcctttcatcttccctaaatcatctgacttcatctcgcttcagcttcgcagtggctcatgcctgtgatcccagcactttgggaggccaaggtggggggatcacccttaggtgagaggtcaggagtttgagaccagcctgaccaacatggcaaaaccccgtctctatgaaaaatacaaaaattagctcagcgtggtggcggacacctattatcccagctattcaggaggctgaggctggagaattgcttgaacctggaaggcggaggttgcagtgagctgagatcataccactgcactccagcctgggtgacagagagagactccgtctcgaaaaaaaaaaaagaaaagtaaataaataaatacataaataaataaagcatacaattccatgggttctggtatatccacagacttgtgcaaccattgccatgatccattttagcattttcatcatcccaaacagaaacctctcccctcagccagccctctctccactccccatccccccagctccaggaaaccaccatccgctttctgtttctgtatttgctagttctggacatttcatacaaatggaatcacacaccatgtgggcttttgtgtctggcttctttcactcagcaacatgttctcaaggtctgcccttgtggcacccgtcagaaccgcattccttttgatggctgaataatagtccattgtctggagagaccacgctttgtttattcattcatctgttgatggctacttgggttgtttccattttttggatattgagaacagtgctgctatgaacatttgtttacacatgaggacgtggaggcggaggcagccacctgggctaggtccctaaccagggcacgctgcagccggctgtctgcctcacagtcccatgtgcctctgcctcccactgcccacctcagaggcccagggccgcagcaggtgaggtggagggggctgcacttgtttccatggggttgtttctgggacttacagtcagagctcctggatgtgcatcttggctccattccttcctgggggaccttgggcagcacacgtaagcctcagcctcagtttctccagtagacaaatgatgagtctattaagggctgtgtattgaggacagaatgagaatgaagaaagccagaggggcctgagagaggtgatcaggaggaggaaggcggggagagaaagagggagggagagcgaacctgagtgcctgccccacccgactcccgacctccgtgagtagagggctgaagctttcccctcctcccacagccatttacccagctctgggggtaattgctataatttcaaggctgggtaatgccagcagattagagagggaaaggctccctcgggttcagccggcacattaggcacagttataaatgtcagcgctgatggctcgtcaagagccccaggatgggggcacaagctccccactgtcctcaggcccagcccttccccctcctctgggctagaacccgagtgtaaggtactgcactccccacagctcaccctccaccatcagccccctcctgttcacctctgctcagtgttcagaccctgcttctgctgcctggtgtgcacccttgggcaaggctctgagcctcaactgcaaaatgggcagcaacaacagcacatgctccatcagccgccctcggcactgtgggccctggtcatcctcccagcgatactgagggagatgctctgggaccccattcgtcaggaggtgaagagagatgaggccccagcctgcgcctccatttccccatctgcaaaatgtggaggttgggtaagaagaggagacccctgagtgcgcttccagccttcacggtctctgcttctgtcctgagggttgtgtggcagaaaccctgggcgtcaggcaggacagggggaggcagtggggagagaggttgaaagaaggcttccccacagtgggctgctctgcctccaccggcctcctgaggctgccaggagtgtttttctcccgtggggaaagcctgtggggtcccttcctcagggcctttgccaagctcaaaggaggtgccattagtctcttggggagctctaagggtctgagtctctagagcacatgcaggggtcccctatgcgtgtgagaaaaggctttgggtccctagggaggagaccaggcatgggacaacctgtccttcccacctttcttcccctcccttccctattcccagcgctatatcatgaacatttgcagacatgagaaaagctgaaaggataatacagagaacacctttgcagccaccacctacaactgtaccgtctgccccctgcccctctgccccttcatctgtccatcaaatttttgatgtattgcaaaataagttgcagatggacaccgcaccccgagacaggctagcatgcacgtcactcactggagttcagtatttgttaactgttttttttttagggtgaaatttatacataatgaaatggacaaattttaagggtagcaatcaatgcatcttgacaaatgcacacacatgtgaggctcaagctcttcaagacagagggtgtcaccgttgcctggaaagttcacccttgctccttccagtccctagaaacagctgctgtcttttttttttccaacatcgcttggctttgcctgttctagacattcatgtaaatagagccatacagtatgtttttttgtttttgtttttggcgggggagggggcgtggtttcttttgctaagcatgtttattttgagattcatccatgttttcttgggtattggtagtccattcctttttattgcaaagtagtaagccactgcatgaatagagcctgctcatttacccgtggatctgttgaccctttgagttgttcccagtttgaggctgttatgaataaaactgttgtgaacatttgtgtgtgagtctttgtgtggacatgtttgcatttctcttgcataaatgcctagaagtagaattactgggcttcctccttttatgggattaaaaaagaaaaagaaagaatgaaagagagacacagagacggaaagaaaagagagaagaagaaagtaaaggaaaagcaaaaagcataggtaactagattgcagaaactttgaacaataaccatcatcgctccaaagaaactgccaccccaggagttctcgacaggctatggaggaaggcttggcattgagacagacttagtgcaaatcttgctttgccacttgtaaactgtgtgaccctagggaagtttcttaacctctctgagctttagttcttcctctgtaaactgagaacaatgagatcagccagtttacagttgttagggggaattccccaagaggaaggctgtagaagccctggccagaacttggtctgcagtggatcatggctaacatgagcccctctccctacctatttgtcttgcaaggtccaaggtctgatgtcgtctcagtgaagcttttcctgaaaatctagttaaaaatgaaaagtgccaacactcacaggagactttccatgaaccggcatgtctctgagtgctctgcaagtattagctcatttaattctttcaacaagcccccaaaatagctttattatcagcatatctattttgtaggcacagagagattcaatgatttgcctaaagtcacacagcaagttaagtgatgaagcttggtatggctgatctctgtggatttgcctttcctggactttttttttttttctttttttgagacagagtcttgctctgttgcccaggctggagtgcagcagctcgatcttggctcactgcagcatctgcctccaaggttcaagcaattctcatgcctcagcctcccaggtagctgggattacaggcacacaccatcatgcctcgctaatttttgtatttttagtagagacagggtttcaccatgttacaggtcaggctggtctcaaactcctgacctcaagtgatccacccgcctcagcctcccaaagtgctgggattacacgtgtgagccaccgtgcccggccccttttcctggacattttctatcaatggaatctaccgacttttttcaccatgcattgtgtttcccagatccatccatatggtgcccatgttgtagcatgtaccagaacttcctttttttgattaatgttccgttgcctagatacacaccattgtgtttatcccttcgtcttttgatggacattgggttatttccaccttttagtgaatgtgattaatgctgctatggacatctgtgtgcaagttttggtttgaatacctgtctttaattcttctgggcatgtacccagaagtagggttgttgggccagatggaaagctgtatgtaacctccttttttttttttttttttttttttttttattccaagtccccaggagggctttattttttcttttcaacatcctgttctgcggcttccttggctctttttgcccgtatgccgaagagccgggcgttggcacgggccatacggagactagcgaaggctttgaaattcttctcttcctcagtgatcactcgagctttctccttcttatagacattccggatgggcatgaccggtccggtcagctgggtggccagtttcagttcttcagcagaactgtctcccttcttgggggccgagggcttcctggggaagaggatgagtttggagcggtactccttcagccgctgcacgttcgcctgcagggactccgtggacttgttccgcctcctcggatccacagaaatgccgatggtccgggccaccttcttgtgaatgccggccaccctgagctcctccagattgaagccgcggccggcgcgcaccttcgtgtggtaccgaaccgtggggcagcacacgatgggccggatgggccccgacgcggggcgcggggcgatgcggcgcgccttggcttgccgggccttacgtctgcggatcttccgggccggctggttgaaccacgtggccacgcgccgctgccagtccttgtggaagtggggcttcaagaccatgccattccggctgggcgtcatggctgcctacggccctgcggctcctgagcaggaaaacagccgagcggaaaggcctgtaacctcttgaggaactgccacaccgtgggttgctttcgagcactcttggggttgtagctgaagacatggatgattgagtggaagatggttttgcaacgcccgtgggtgtcttagagaaactagagcaagataaaaccagcgtcactaaactttcacagtcgctcccctgccaagccaagcctccctcccacacctggtcatcttcttggggctacctgggctctttactgagcttccttctccttcatcccggacctcctggggcaccttcctccagcagggcagtcctctgaggttgaccctgcacggtcccttctggggaccgggttccagcactcctcctggctgaatcccacatgcagccaggctagagggctttgcaagtggcaggggaacacctcgatgcccagttctcgggaccctgccttacctcccatgctaagggcatcaggagcccgggcagcatccatacctcacctcacctccctcccatggtccatggggtcaccaggaaggccaggccctgggagcaccagtggggaggcacccctcgcagtgaacctgaaagtttattatccagtccacacacacccaacctgtgctgtgggcaaggtactgttcacaggctggggacacagtacttgtcctcattgagaaggtccccaaggcccagctacataatttccagggcctggtgcagaatgacactgtagggcctcttgttcaaaaatgtaaaagattttgaaggtagggatagcaggggcccttctccctgcacaggtcccagcccacgaagctgtgggtgggcacattctagaacagcactaatgccctgtacatggggagtgggtcattaggcctgagccacccatgggccctgggtgaactcaggtgcaagaagtgactttggaaaacatccgtccatttcccactttagcactggaaacaccagtgcggagagaggggctctcagcctgctcagggctcaggcagggcagcgaccagcacccgcaacctgcatcggagcctgagcgttgcactgcaccccctcctcaccctccctgctttggagagggtgcaggctgtgcaggagtggaggtctgaatgaactcaggtgtggacgtgtgttgggaagacactgcaaggcctggccctgccagcaaggtaaggaagagaggatgatgtgtgtccccaccctaggccgagaggagcccctgacagttagcctcacacatggctgaaaaccatttagagaattgacactctgacctcagcatcctctcagtccacaaagattgattcctggggaccatgccgttctgtctctggctggatttttcttttttgaattgaggtaaaatacacgccacatgaaatgtatcgttttaaccatcccccctctgcagcccctggcaaccgtcaatctgctttttgtccccacggatttgtctattctggacattgcatccaaatggactcctatagcatctggctgggtttcaaatgatcctggcttccatttgttgaacgctgataatccctgtgtcagcatatgctgggcgcttctatccgcattatctcagctcatccgcacaacagcctaacagctggcacatctcacagaggggacaactgctctcagagaagccattcagacagcagctggcagtccccaagccctctgacctcaaggacctcaaagactctggcgtggcggagtcgagccggccgtgtcagggaaagagcgggactcatctttgtgtccaaaataatatgagcagtcacaggggagctctgaggggctcaacaccctcatgttcagatgcggagaggccaaatggtggcaatgcctaagtcctcgccaggaggcagtagcagagctgggcaagtaggcgaagagtctggggggctccagcccccctccagcagtcagcccccagtctctatctcagcaccccctggggaaggcccagggtagagctgactctccacccacagccaagggaggagcctggcacctccttcatttcctctcctcatttaaagaattaccacccctgaggggtgtttgctttttgagagagagagagagagaagagagaagagagattcgtctgcacagcttgcgtatcccatggatggcaggagttaataagagagtcttctccgcaattaatacccttgtttggtcacaggatgggagcatcgccgtcctctgttgatctgcctggaagaccaaactcaccacccaaagcggaactcccctggggacgttttgttcccagcattccatggcagctgcagaaacggaacacagcttgctcctccagggacccggccaagtgccttgggtggacaggcccagggatgcggcaggacagccaggcctgggggtctgtgcagggaggggcagcagctgagcccaagatggtgccattcagggcccaataacaggtaaagtattattagtgagggtgccaggaatgagagcactcattgtgggtggcgtcgccaagtcagaaaaggataaaccagatgaattctcaggtgctcacttggtgtgggaggcctgggttgaactcacacacataggtggatacaaaaacacatgtgtgggtaggtggctctgctcgctgagagggccacaagcagcgtccccccagcagccatgagcacagtgcccgcccagatcttggcctgtcatgctgtcctccatcaggctccttggaggaagcgtctggaatcctgtgttgcaccatgaaatcaggtggcctcaaagaagggttgggacgtgtcacagatatccagaagccaccctgaattggcaaaattgggatgctgtgagcatcaacataaacaatcgtaataacagactgtaacccaaagaaggaataggaaagcataagtccttgcagatataagcaaatgaatgaatcaattgaacatgtgctgagcaatggaataatggcataatctcaaaaatacttattcatgacaaaggggaaaatagtacctttgcactggagaagcctgatagacatcatctaatcgagtaagccctcccctgggtgccatttccctggcaacacctatgctctcccgcgctggggctttgctcacctgtgcgtcacctgacatgccctcctctctgctctcggctattaaaatcctacctatgattcacacctggctccaaggccacaccctccccagcgccttctctgaccactcccaccaaaagtgactttagatcctatttcattcattcactcaatgctattatgctcctactgcatactgaatgagaggatgccactgaggatacaggaaacactgatcagggagctccccggtctgcaagggacagtaggcaggtgaccctctcatgaaaggggcctcttgtgttttatggctgggctggagctaaggcaaggtgggagtggggatgtttcaggtaaaggtgttgcaagacagtgggtatgagtcatccccaagtcctgagctcagcgtgactggtcgggtggcaagatggagaggagaggagagtggcactgctaggaagccccctgtcagggagacagaattccatccaggacttacgtgtcactagcattttgctacaaaccaaatggtccttggttggcgggaagcccagtctggaccctggtccactgtgtgggtttgggaaaccccctaacctctctgagtttccagttcttcgtctgtgacatcaggggctgggttgaacagtgtgtgggtaagctggaatccaagaattctacctctggaaggcagtgcagcagggcgaacagggttcatgggtctcaaggtcaaagggccagctgagggagagctggactgtgcatgcttggaccggctggctctgggctccagaagggactgccgtgtgagaatgtgagttccctgggaggaagttgttgcccaagccccgctggaaagccagactgccctgctctctgggggattctggtgggagagggaccaggccccttgagctcctgcttggccttagctgctgtgtgtgagcagagagcagctccaggagcaggcttgaggcctctggctctcggcctccttcgcagctgtcattcagactccgcagctttcctgtcttgctaggagcctgcactacctcttcccacctgtgggctccctcctggctgcgcacaggcctggcacccgcaggtgttcacctgaagggtgagcccctagtggctggctgacgtctgtggggattggcatggtgacttctgcccaatggccttggtgccttatccagacatcctccacacctcagactggcggggcagaggctgtcaggggagcccagcagtgtgtgtggcctcgggacatgtggcctcgggctgcccccctgcgctttcagagcacctcctttggactggaaggtttgggggcttctggaatcctctgagacctggctgtacctcaaggcctttcacaccagccccttggaactgacatcaagaccctaaggcctcggggatttaggggagatggccaacggagtgggggccatgagacccacaggggtatggaagggctggaaaaaatcacagccttaggggagacaatggcttcctgtgcttcctggattctaacgggggtcctggagccttgcagcccaccccctgcccggtctctcccatccctctccttcctcctctggcctcgctccagggtctgacagctgcgggcttgactcccagccccaccactcactgtgtgctctcagggaagtcacttaacctctcagaacctcagtttcctcatctgtagaatgggtaggagaatagcacatttgaaccacagagatgagtggttaaggatgccttcccgtgtcaggcatgtcccgtggtgcctggcacgtggtaagtggtcaggtgagttccactcctcctgacgttgctgtggtcaccccgtcctcccctgatggcaggcgctggggaagcagctgtggtctgcagaggctcaggccctcctgagccgcagccttgtctcagctccagccaagagctgcaggaatgtggcttgccataccacaaactgctctctcgggtgaccatggagattcggacttctcctgtgaaaactcctgaatgttaagtggaggtagtgcagcgttggcagtcactgccctgcccgtgtccccaccacgaggattgccagatgaaatgcagatcaagtgagccatgatcccaccactgcactccagcctgggcaacacagcaagaccccaactaaaaaatacagattgtacaggttgccagtgaactctgattagggatatttattaatttactttcataggtcactgtaacctcgtgctcttgggctcatgagatcctcttgcactgatcccccaaagccctgggattacaggtgtgagccacggcacccagcctaaatttggatttttttttagtataaatacatactaaatattgcatgggacacgcttatctgaaaattttatttattgtttattcaatattgaaatttaataataaaattaataaattattaatttatgaaggccctgtgtgcctatgcgtgtgtgtgtgtgtgtgtgtttattttctctctttatctctggcaacgctacctgtgactcttcccatttctgagcatgcaagctcagctccaaccatatctgcactttttggcccacagacctgctctgaccactggcacccacagccaggaagggctggggaatactctcctgaaacagtgacatgcctggcgtattccacacagggacagatcattttttaacacttcccttctctacatgacaaaattacattcaatactaatcatgaaacaaaaggaataatattaatagctaaaaaaggaatgcaagaccaggtgcagtggctcacgcctgtaatccaagcactttgggaggccaaggcaggtggatcacttgaggtgaggagttcgagaccagcctggacaacatggtgaaaccccgtgtctactaaaattacaaaaattagctgagtgtggtggcgggcgcctgtaatcccagctacttgggaggctgaggcaggagaattgcttgaacgcaggaggcagaggttgcagtaggctgagagtgtgccactgcattgcagcctgggcaacaagagcaaaactctgtctccaaaaaaaaaaaaaggaaatgcagatgagaatttgcttgcaatgacctttctgtatgaaatcatgatgaggaaaaatggcatcagaaaagtgataaaaactttccttcatgttgatcagtcacgataatggataatgacattatggtttctattttcagctttcttttctgcagttgtgtcaagtgattttgtcaacattggtcttcctcatggacttgtgttgaatagccaggcttcaacacagtgggctgaatagtcagctcatattctctcctagggaatggatgagcattgtttattaacttcaattttgtaaagtttctttttgatgaagcaatgggtacaaaatgttagaaaacgtcttcaacgtaagtataactttggtagagttctttcttttttcgagacggagtttcgctcttgttgcccaggctggggtacagtggtgcagtcttggctcaccgcaacctctgcctcccgggttcaagcgattctcctgcctcagcctcccgagtagctgggattacaagcatgtgccaccacgcctggctaattttgtatttttagtagagactaggtttctccatgttgctcaggctggtcttgaactcttgacctcatgatcagccagcctccgcctcccaaagtgctgggattacaggcatgagccactgcacccggcctctcagagatttttaaaaatcccatttcacagtacattccagaatgggcaacattgtcgaggtctttatttctctgggatcagttctagcagtttttgattgccttcaccgtagagaaatattgagtgaaaatggaaactccaagtgaaaacgaaaactctaagtgctgatgaaagtaactcaagctctgtcttttcgccctcacagcctctgggctgtagctgcttattctgagtatcctgctgggacctaagaacatgagacccagaggtttagagacggaaactgcacctgaatgagctggagaggtcctggagcattaggaattcactctcgaaacagacgcttgtagctaaatatgcatgtcagggctgaaccgggtgggagtttgcagaactaacttctacatgtacaatataaagtttattaaagaatgaataataaaaagtgtgaacttggagcttcacatatatcattaaaactcaacagttaaccctggaaatattctggaacttgaatgaacaaaagatctaggaacctggaaaacatctctgatgatgtttagaattgtctgtgcatggtaataataaaaacactgatttatagttggtcatattgagaggtgaagccggttgggcttctgggtggagtggggacttggagaacttttctgtctagctaaaggattgtaaatgcaccaatctgcgctctgtgtctagctaaaggtttgtaaacacaccgattagcactgtgtaaaatggaccaatcagcactgtgtaaaatggaccaatcagcgccctgtgaaatggaccaatcagcaggatgtgggcggggtcaaataagggaataaaagctggccaccatgtgccgccagtggtaacctgttcagtatgcttctgtgtgatgcttgtttttttttttttttgctgtttgcaatcttgttgctgttggctgtttgggtctgccctgattgtaagacacccatggcaaagtctgcagcttcacacctggatgaagtcagcgagacggtgagtccaccaggaggagtgaacaactccagacccgccacctttatagagctgtaacactcatcgcggagctctgcagcttcactcctgaagccaacgaaaccacgaacccaccaggaggaacgaacaggtctggacgtgccatttttaagagctataacgctcactgtgcaggtctgcagcttcacttctgaaaccagcgagaccacgaacccaccaggaggaatgagcaactttggttgcgctacctttaagagccggaacactgactgcgaaggtttgtggcttcacccctgaagtcagcgagaccacgaacccaccacaaggaagaaactccgaacacatctgaacatctgaaggaacaaattccggacatgccatctttaggaactgtaacactcaccgcgagggtctgtggcttcattctggaaggtagcgagaccaagaacccactggaaggagcaaattccagacccaatattattgtagaattctctccagagtgtgggtgtggtggctcaggcctgtaatctcagagcactttgggaagtcaagttggaaggattgcttaaggccaggagtttgagtccagtctgggcaacatagtgagaccctgtctctgcaaaaaattaaaaaatccagatgtggtaatgtgtgcctgtgtcccagcttttttggaggctgaggtgggaaaatggcttgagaccaggagttaaaagctatgaagagctgtgatcatgtcattgcactccatgttaggcaagagtgacgacccccaacttttaaaatatatattgttgaggcagagtttcacactgtcccccaggctggagtgcagtggcatgatcttggctcactgcaacctcttccatcaggttcaagcaattctcctgccccagcttcctgagtagctggggttacaagcgcctggctaatttttgtatttttagtagagaagttttcaccatgttgaccaggctggtctcgaactcctgacctcaggtgattcacccacctcggcctcccaaagtgctgggattacaggtgtgagcctggcataaataaaattttttaaaagaatgaaacaattatctacagacaacttgtcccttcatggcctgcgtaggcagggccctgcctttggcatcgtctgtctggggccagctattctttgacgtgagttggggtaagtgtgccagctccctcgctccagcacagagggactgatctgagccctggctttcctgggcagatggagctccagctgccccagaggtgtctatgtcagtaacttgcccctccttggttgctcctcccatctcccttcctcccataccagtgtttcctggaccaccttatgaatcaagtgcttgcacttacatcctgtctcaagatcagtttttgggagaatcccagtcaggacagtagctcattcaaaaaataaaaaataaaaaaaaattcaaaaaacacacaacaggccgggcgcagtggctcatgcctgtaatccagcactttgggaggctgaggcaggcagatcaagagatcgagaccagcccagccaacagggtgaaaccgtgtctctgctaaaaatacaaaaattagctgggtgtggtgacgtgcgcctgtagtcccacctactgaggaggctgaggcaggagaattgcttgaacccaggaggtggaggttgcagtgagccgagatcatgccattggactcccgcctagcgataaagtgagactccgtctcaaaacaaaaaacaaacgaaaacaacagtgacaacaaaacacacaaaagacaagccaacagaataacatcactggtcctcagacaggtggatgattggataggcaggtgataaggaggtaggtaagcagggcttacctgaagctcatggagcggaagttcaatgtcttacttttctaattttcctcttctctgagttcatgtctccttccaactctccctcccctccagcctccacaaagggaaaacgaagcccccagatcttgtcttttaagccctcaacctgacgtcggggaaagaactctgacctgtctttcctccctctttctggcgtgagagggccacacttggtagggggtatcctccttttcacagctaataacacagaaacgagctccttgtgcccgttgggcaagggccacagggatgggcctcagcccccggcagaaaaggctccccagctcccgagggaagtttgggagcagcccgggagctcccatgggcaggcagtaggcgtgacggaaagagaaaaatcacagctcacaccaagtaaggcctgttgctgggtgcgctgaacctttggacaaaactttgtttcacttagcaaacctccataacaatgctttgaggaagcgattcccattttcagacaaggaaactgaggctcagaaggcaaagtcacctgcctaagtttcacagggcttcgggggtggaacacttaccagtaggaatgctggccagagccccttctctgctcaaactctgcctgtggctcccacgtcactccaggtagaagctgaaatcctttccatggctcacatggctctgcttaatcagtcccccaccctcacccgattccccctaagcctaccccccaccacactgcctattcttgttcctcagatagccctggatcctcccgcgttggggccgccatccctgtatctgactggagctggcttcccatggaagtaggtgacccgcagccacctccctgcagccaccaggtctctccccacaggcagcttttcctttcggccttccctggccttcctgttggagatcgcagccctcccacccactgacctcctgcggccaggactccctgacgtattctccatctatcttacatggttatgtattggatatctgcctctttccagcaaaacattggctctgaaagggcagagacttttgcatggtttgttcactgtcatttccccggtggccagaacatcacctggcacatagtaggtgcccaatatgtgtttaatggatgaatgagttgggacctgcacccgggtagtttgaactaaagtgaactaactaaaatgtaccctgacagaaaccaaacttcactgaattgtaaatcagacttcagtatttaaaaaatttatttttactttttatcatggaaattttgaataaacacaaagtagcaagaatagtataacatgtcacccagttgcaacaattgtcaacccacgggcaatcttgcgtcatgtgcaccttctcccacttccacccttcctgtgttatttagtttaaaaagtaccccaacttttagcatcttagtagtttagcaaaataccagttcctgtggatcaagaatctgggcccgtctcatctgatggctcagctgagggcagagctgctcctgagctcattcaggcggttgtcagtaggactcagctcctcccaggcagggggccagaggcctccctcagtcctttgccaagtgggtctctccagagggcagcttacaacacggcagtggctttgccagagtaagtaaggcggtgctgggtggggggagtccagttgagaggggagtcacaatcacttgtgaactaacctcagaaatgacatcccagcccagggcagtggctcaagcctataattccagcccgtttggaagctgaggccagaagattcttaaggccaagagtttgagatcagcctgggcaacttagccagaccccatctctaccaaaaaaaaaaaaatgaaaaaaattaggggggtgtgggtgcacacgcctatagtcccagctactcagaaggttaaggcaagaggatcacttgatcctgggaggttgaggctgcagtgagctgagattgcacactgcacacccggcctaagcaacagagtgagaccgtctcaaaaaaaaaaaaaaaaaaaaagagaagacatcccatggcttttgtggtattcagttcatttgaatcaagtccctaggtttggcctacacacaaggtgagagattgcacaagggtgtgaatgccaggaggggccctagcccatgcctcctagagaaatgtgggctcctggatgcagggccctgtgcgtgaacgctcaccacagcattgccacaaggcagaggctttgtgcaccacggcgcatccccccagccctcctggcccagcagtgctgtgctgcggcactgcctccaccctgcctgtgctgtcctctgctcttctgcctctgggcttgctcagcccctgcaggtacaggctgggtttgtgagggagctgatgttcttaggggcaatcttgaaccgatgggaaagtgagtctgtagatgagtctctgacctccatcctatgcattctacgtagtgcttcatacaatccttggtggggtcaagctgccagtgccaacagcagtgaacacctttgctgggcaccctgcgttgtttctggactcttcccctgttgtggccagcttctgagatgacctctgatgagccttacctccagtcttcatgccctgtgacgcctgtggtctgtttacctagtggagtaaggtggaggtgatggtgtgtgactcccaaggccgggtcaccgaaggcattgcagtgccctcctgcatcttttggattctcgccctggagaatgccagccgacgtgttgtgaggacattcaagcaccctgttgagaggaactgaacctccaactaacagccatgcagatgagcttggagacagaccttccagccccaggcgaaccttcagatgatggcagccctggacaatgactgacagcaaactcacaaagaaagctgagctggaaccacccagccaagacccacagaagctacaagggataaataaaagataactgttgctttaagccatctgctcatggggtaatttggtgcatggtagtagataatagtgagacttttattctcctacttcctccgtcttgcttcctgagagcacctcccagaccaactgcctgcacccaagcctttgtctcagctctgctttcaggggaattcaaaccaacacagtcacagtgaaaacttagggtcaagataacgtctatccacaagacactcgataaactgtggtattgttattccactgaccccaaacagcagtgaacatgagtgaccaagaactacctcaatcagctaggagaggtccctagcacctaatgtgaaatgaaaaaaatcaagaagcaagaaaaaagaagaatacccacagtgaaactctcaataaaaagtttccaaacacatagttccattatttgcactaatgcttatgggcacatatgtatgtagtggtaaaagcacaaaagcttttgtgagatgagcaaacgccagaatcagagtaatggccacttccggggatacaaagagaggagagactggctgggaaagggacccaggagcaccatgtattggaatccttggtggagaattgaagcagatctgaagatgaagcttgttggtgagtgcaaagctgtgtgttatataattttctatgcctggttgcatattcattgttgcatttaattttttttttttagatggattcttgctctgtcaccaggctggagtgtagtggtgcaatcttggctcactgcaatctctacctcccgggttcaagaaattctcctgcctcagccacccaaatagttgggattacaggcatgtgccaccacacccagctaatttttgtatttttagtagagacggggtttcaccatgttgaccaagatggtctcgatctcttgacctcgtgatctgcctgcctcggcctcccaaagtgctgggattacaggcgtgagccaccacgcctggccacatttaatattttttaaaatgagggatgaaacatacaaagggaacttggaggtctgattccatttcagccgctggttccgtggccttccagagcacttcccaaaaggtaccactcatggtcctgcctcaatgactttgcattggctgttccatccccagcgatacttttccaccagagagatgcctgacctcattcttgcccttgtgttcagaaccacaaaacactgtatattgtaaaaatgtcccgtttgcttatgcctgagtgaatgggtttctgctgctaaccccctgaccaggcacagagcagtggtctttgcaaggatgggcctggggcctttgggtcattcctcctgagaaatgctgctcaggcctttgaccaagacacaggaaaaagggagcagagatgcaaacacagatatgcagcaaccactctgcccagattcacctcggcttcccccttggcacttgctattttcacagctctccaaggccattagtgacaactgtgccctaagtaggtcacagcgattatcccccttttaggggcaatcatcatcatcattgtgaggccgcaggttggtgtttagtgtcctgctgttccacgaactacttggacacttgacagcacaaagcccttcagagaggccaggggcagcaatctgctctttcctttttccagaaggaacagaggttgagagagggtaaatgaaccccctgccctgccaagaagagtgtcaagtgggctttggggaggggatgagtccccctcagacactgtgaaaaaaaggatggtgtcctctgtgcccaggatctggtgttggcaccacagaccacccccttccttcagagaacgtctcctctgtccctccatgtggtcctggggaggctgccaggccagctcaccgccaccctccctgcagtggggagcagccggtccaaatgggatcatgagccacaaagcacacaggaagttggaaatccagtggtgcaatcagaagcagaaaaacaaaacccccaaatccaagtgtctcagtggaccacaagataaattcaagttggcaagataaaaaggaaggtttcgctaagtgttatttaagaaaaacaagcaggcagggctcaaattgggaacagaatgtgtggggataagcaaagctcttcttcttgtacatcccacagtttccagagaggaggacaacaaaaatgccttgagcacttgaggtgaggacctggaggaaaggttcaagagaccaaaggcttgcaacctggagcagagaaaagcacagcctcgctctgaggcccgcccttaaaggctgtgccctgggccctgccaggccccacccaggtctggccctcacttccctcactgttacacatttgccttaaattaaaagcagacctgcacacagccacccacccgatcctaggggctgacaccatattttatctgccattcttttattttttatttttttatataggaaaatggagacccaggaagatgcacaaacttgcccacaggtcccaaggctggctgggactctgtgggacttgaagcccaatgctggagcccacgtccctcactgctactccctgctgcggccctgactcaccccttccagcctgcccactactctcagcccttccaggctgcccactaccccgcctgatgctgggtcctaagcctgtgggctccggcccagcccagctgtgcgtggatcatagagttgaatggtggctcactggtctcccgctcccacccctgcccccacccacacactgctagttttccttctagcagtcagagggacgctgttgaaagtcatcctccttcctccccacaaaccctccagggctcccacctccctcaggatgaggccagagtcctcccactagcccccgtgagtgctctggcctggtggcatgcctgctccccttgctgcctgctcatttcattctggccactcacggtactgcctcagggccttcgcattggctgtaccctctcctgcaatgcttttccacactacacagacagaacttgctccctcacctccttcagactttgttccactgcagcattctcagtaagccttcctcgagcgccttgtggtagagaggtacagaaataccctctagggtgggaagaaaagcagccagcctggggccccagtcagggcctcaagatgtgcccttatgttgctccgatcctgccctgtctcagggtgtgccctgctctcagatgtgcctgccgctgacgaccattcccactccgacaaggaggctgcaaaggctgtagcacccagggatgaggatgaagcatttttattcttcccactgtaagacgaagtagcatgcgtaagaagccacgttggctcatttctgcttgaacccctgactctgtgacaacgtgcagctctctggaaagatgctttgaaggcaaagcaggatgaagcgcccggccccgcacgtctcttgcctgagtcacttgattccttaaaagagaagagctctagtccttgcctttctgacaggcttaatgacgatgcctctgccatctataaccagaggtgctcttacacccacaccttgatgggctgctgcttcaacgtaacttctgagcaagtccgatgtgattttgcacttgctgaacctccaccacctgtatgtaagccgtgggcttcaacagaactgccctgaggcagtagatgtggtctggagtcctcagactcctgaatgaaatgaactttagttcttcgaaagcttgattttgttttcgttgtcaacactgggaaattgggcttagaggggcttccaggggcctctttgccctccagctttccttgcctcctcttgtctcctgatttgctcttatgtttctctaccttccaggaacccgagttgctaagctcctagctccagcctgtcccaccagcgggggctccaaggggctcaggcttcccagagtccagtgcccacatagcagacaaacccacatcgtgtgcccgagtctcctggcctggtttaggcatgtgattacactcatggggtctgtgtctcttgctcggatttaaccacataccctcccaacccgccaactaggtttcaatgcaagggaaggccagatccctgtatgtcatgtctaacccacacacccacgtgagcgcatgtctgtgcacatggagcgtgtgtctggggtcccgatggcagtgtttacacaggaacctctgtccagtgagcaggcacacacgcacgtcctgggcatctggtgctagaactctcaggagtgagaatggggtaaggggcagagagtcctttacagtgggccaccagggcacccccactggcggcatggacccaccccctcagggggcatagaaaatatctggagcctaggttgagggtatgaacgtccccagggagaaggaaggtcatcagtgaatgtagagtgggcagagttgccccttccaggggagtgagcaaggggcacatcccgtcagtgctgggtccaccgagggcttgggggctgccattagcccatgtggtgcgttgtgtgaaggaagaaagcgccctctaatggtggctgcagtcccaagggttgcagggcttggctagcggagcatggactgaatgtcaatgagcactgcgcctttggcaggatgcccttgggcagtgcacagcctgtaccgctgtacagggcatccgtgggggaggcgggacttgtggagacacatcagaccaaggtcagctccagtgtgaatgggggaagtgagggaacccgagggcagcaagaggtggagaggcatccaagaaaggcccagaggatatgtaggctgggtccccaccagcagtcacgtgagtgcctggcaagaccatgagtcaacatcccagcacttggggtggagtgaggtccacacactcactcctctggtgccaccacagctcagggggcctcttgtctgcacgctgagccaggactggccacgatggagggggccaaagaacaagagagccctgctctctagttaaagagaaaatatgcacccacacggaacatgtttaaaaatgttcttcacaagttaaacctagagtcaccatatggcccagcaattccactccgaggtgtctacacaaaagaattgaaaacaggtggccgggcatggtggctcacgcctgtaatcccagcactttgggaggccgaggcaggcagatcacgaggtcaggagatcgagaccatcctggctaacacggtgaaaccccgtctctactaaaaatacaaaaaattagctgggcgtggtggcaggcgcctgtagtcccagctactcaggaggctgaggcaggagaatggcgtgaacccaggaggtggagcttgcagtgagccgagatcgcgccactgcactccagcctgggcaacagagaaagactccatctcaaaaaaaaaaagaaaacatgtatttgaacaaaaacttatacataagtgtttacagcagcagtattcataacagccaaaaggtgaaagcagcccaattgtgcatccacagatgagtggtaacaactgcagatgtggatccaagcttggacacttcttaccttccagaccctggacaagttctgcagcctctcggaccctcagtctcttcatctaaaaaatgcaaacgacagtgcccagttcttgggtggttgggaaaactaagcctacatacataaggtgtcagatgccctgtaggtcctcacggaggtacgatatacctgtacgatgggatattattcagccacaaaaaggtacaagacaagtggaccttgaaaacactatgcagagggaggatggcagtcacaagaaatcacatacaattccacttatatgaaatatccagaataggtaaaccaacagagacaggaagcagactgctgggtgcctggggccggaggaagggaggagtggggagtgacagctcatgggaatggagttcctgtcaggggatgaaagtgctcgggagctagatagaggtgatgactgcacagcactgagaatgtactaaatgccgtgaaattgttcactctaaaactgttagttttatagtgtgtggattttacttcaatttaaagaaatctcatgcctgaaatcccgacactttgggaggccgaggcgggagaatcacttgatcccaggggttcaagacgagcctaggtaacacagcaatattccatctccaaaaaaaatttgaaaaattaggtgggtgcgctgtcatgcacctgtagtcccagctactgggaggctgaggctgagacaaaaggatcacttgagcctgggaggctgaagctgcagtgggctgtgactgtgccactgcactctagcctgggtaacagagaaagacttgcctctcttaaaaaaagaaaagaaaagatcaagaaagcagatgaccaacggccacaaaaatttgcagagcttcttgcagactagggaacacaaggctggtgtttagaatagtcaccagctggcctcatagagaacagtctgagcccacctctccctgatgggttgtggggaggcctggggtcctggaagaaggccgtgtggctcaggttaggggcttgggctatgaatccctaagtatgaacatatctgcagacgccccctcccgctctgccgcaggctcccgaaggaggtctggacagaggggaggagggccaagggttggtgggttttgagggtcaaatagcaagcacttgggtccggccaggtccaggatgaaatgccagattttccatctgccgtctgcatggacagatcctgcagtttcccaaacctccaactcctcaccagtgaaatggagccagtaattcccacccagcaggagggtgagggagaaaatgcacggaggagcctgggtctgcaggcaggtgtggagggcaggtgcctggctggtctggtggccgtcctttgattacttttcagaagcagccggaaaataaggctcaagtgcccagaatagaaagccaggccgtccaaacataggtttaaaaaatataaccgggaaaaatcaacttccttatgttcacactcgacctcaggtgtattcatggggaaacggcgagaggtctggaggatgtttgcagctgctgtgggtggtggtgggcaggaagccctccccaccaccgctctgcctgtgcgcccgatctgcccgccgtggggcccagacacacttcctcctctccctctgcgctctgctccgagggcaatttggcatctgccgccttcaattaacattgcagactggaagtgggggcctaggggaaggaggtgggccgcagcggagaaaaacaagcccactgtgttgacagctgggcacaccacctgctccagtgtggcagggaagttgaggaccgcaaagccaggagggggtgagggaaggctgttgcacacactgggcctctgtgcccccctcaccggttgcacccccagatgcaggctctgtcccagtccctgtgccaggactggcttgaacagacccctcagccctctgatgggaggagggaaggcaggatgcaccgaggtgggagtgtttctccagccctctctctgccaggctgagtcttgctggtttcccttgatggtgcacaccaagggatccttcactgaactccctgcagttaccgtggcaggcaggctttttcctgctgcaacactggctgctaccccagatagtgcctcggtgggtgactgcgtaaggagagcagctacctccggccctactgccaggttcagctgggtggcactgggcctgcctctcatcaggcacagtctttgaggacagtgaccaatgactaacctcaacaatgacactggggccagggctgatgtctgtgtctggtaccttatgtatgtgggcttatttttccaacaacctgagaagtgggcactgtcatcccattttctagatgaagaaactgaaggtctgagaggctgcagaacttgtccagggtctggaagataagaaacttcaaagccaggccggggcctgcatctcaatctcctaatcccagcaccttctggttgttgcccaagctgcccctggggaagtccagagttaaacgcagtgaaggcagagtcatggaccatgcgtccagggacctgggcagtgccatagtttgaatacatcccccagagttcatgcgccatccccagagcagcaatactgaaaggtggagtctttaagaggtgattgccctcttgaatgtattaatccattcatcaattcatcatcaatccaattcaacaattaatggattaatgggttatcacaggaggagagctggcagctttataaggagaggaagagagacctgagctggcgggtgggcacgctcagccccctcgccatgtgatgccctgtgtagccttgggactccacagagtccccaccagcaagaaggccctcaccagatgtgccccctgacttgggatgtctcagtctccagagttataagaagtaaatttcattttgtgtaaattacccagtttcaggtattctgttgcaagcaacagaaaatggactaagcccagcagtgagatgctgttggcatcacaggactctgtcatgagcatccacaagcagcctaggcttttcaagcctcagtttcccagctagaagatgggtcagacagagcccctcatggggctgttgcaaggataacatggagacaatgggtgcagggtgagtgcctgggatgtagggaagggttccataaaggatcaacctcttgcttccgccgcctcctttttttcaggatccatgagactctggacacaaaacggctttgggactcagttagcagcatccagggaatgggaagcattgtagggattctgtccaagtcactgagtcagaggtggtggaaaattaagccccaatagggcactgttttatcccgcatgtgcatgtggggaagcaaatcaggacccaggagatctggattctggaaagataagacaaggcgctggaggaggtgccagtctacttcagagtggccccaagaggcactgttgggctccctcagacagagccagttccatttaacccaccccctgacctagtttggtgtctctatgagagacactctgcagagtgcaaattgctctgaaccaacttcagctgggccaagtcaaatgggaatgagatgcacatggagggccttccccatgtgtgtccacacatacaggtgggagagcatgtacaacccatgcaccccacctccaggcccatcttctgggcaaggcatcccctccctgggctgcttcctcattgagtgaagtgcttggatggaaactgagttgcttgcatcctttccccccagagctgtctcttcaaacaatctcccatggaatctcagcataaagagaaagtgggagcacagatggggcgtgtggggccctggcctccttcacaggccaactgggaccccacagagtgcagctgagccccagcagaggtagatttcctgggccccttccgggcctggtgctgtctgatgggtacctacctgtcctggtgatgtcaccccagtgctgtcaccagaggttttgtgtccagccctggctcagagctcaacctatcctgcatgcgtctggtgacctttggcatccgcagggacacgctgtgctgaggctgggctggagggaggattacacggctcttacgctgttgccaaacacatcttggagaagaagagagaaagagcaaaataaacagagccatgttcacctccctggtgcccgatgaagaaagcctttcctgaaatagcttggccacagatccttgtggaaaatcccaaagttgagagagggatgcaccctcctgtctcctgtagagagtagagtgccccccatcttccatcccccccagatctctgggcacttagggaaataacctgtttagaagtagttctatttttctagcaattgggagggtcttgtgtatagaagaaagtgcaagaaaattaagtcatctggacatattgtcgaaaaaatcatgaaggacatggggaatcatctccacccctttcttcttgcatgattttgggcgatgtcactttagccactgagacttgacctgtgtgatccggtccatggggtcctacaaatatctattaggctccaaccaccgcatctggctcatggaggaatcagaacatttcctttcttcctcccgtaggttgcatcacaagcaaggggctaagtgagcctcagtttctgcatctgtaaatgcgggtgtgtgcttcatgaccaaggcctccaacagctaatatgaccccagtgtcaccctgggtgctgtgggccactgtgtgcacaggaagaaacagactgggagggactaaacagggaggagaagagatgtaagacatatggggagatagggaaaggaatagagagggccagggagagacagacacacagtgaaatatggtggaagacagactgggaaagacaaggagagagacaggggcccaccagagattagagagagacacagagatagaaagagaccagagaaatggcagttacagagagagatgaggagagaccagggagacacaaagacagggacagacacaaagaccagaagaggcaggagagagaggaaagagacacacagagaaacagggagacacagaggcagatacaaagaaacgcaaagagatacaccgggagaaacacgcatttacacaaagcaactgttgtcctggtttcaggtttgtgggtccaggctccagtgaggtacgactacgcctgtaccctcagcttccaagaacttcccccttgtgcccctgagttgtctggagtggatttctgtttcttataatccaagcatccggagtcagatgaccccctcttccagcaccagcagactaccttggcccactttgagcctggcctcttctgctcacacatccctcctgcccaaacatcctgggcatttttttgtttcattgaagaaagatttttgttttgaaataatttcggatttaccaaagagttgcaaagatagtacagagagtttccatgtacctttcactcactttacttagtgtttacatcttacagaaccatggtactatcctcaaaactaataattaacattgttaaaatactattcaataaactatagactttattatgttgccaccagtttttcactaatacaagagtcagaaaactctttctgtaaaggaccagctttgcaagccatatggctacacaaaagcaaccactgaaaatacgtaaataccagcctggataacatagtgagaccttgtctctaccaaaaacaaaattttaaaaaatcagttgggtgtggtggcgtgcacctgtggtcctacttacttgtgacgctgaggcaggaggatcacttgagccagggaggtcaaggctacagtgagctgtgattgcaccagtgcactccagcctaggtgacagagtgaggctctgtcagaaagaaagaaagaaaggaaggaaaggaaagaaaaaaggaagaaaggaaagagaaaaaagagaaagatgaaagagaaagaaagaaagaaaaagaaagaaagaaagaaagacagaaagacaaatgagcatggctgaattccaataaaactttatttacaagagctggcagagggccagagttggcccatagactgtagtttgctgatccctgatcaatgttctttctcatttccaggtctcacattgcctttagtcgtcagttcctcggcctttctttgtctttcatgaccttgatatctgtgaacagtcctggtcaggtattgtgcaatatgttgctcaatttgggtctgatattttctcataattagattgaggttatgcattattggaaaaactaccccaggagtgatgatgtgtcattctcagtgcatcatatcaggaagtacatgatgtcagtgtggcttattactggtaacactgaccttgacctattggttacagtggtgtttgccagctttctccattataaagttattattttcccctttgtaattgataggtattgggggaaatgctttgcatctgtgcaactcttgtttctccttaaactttctcctacgagtccgagcatccatcggtgggtcttgcctgcagcagttgttcctgtggtgttcagatggtgatttgctgtttccctggttccttccactttcattaaagggaactcctctcgaaggaaaaatggtcccttcttccccatttacttatgcaatcagttatttatatcagtatggattaatggatatttattttatttgatgagctaaaacccaatagtataatgtacctggatgtgttgctggactgttccagttttgactcctgggagttacttccagctggctcccacatcttctccacagtcccctcttttttgagctcgtcctgactttctggccctacttgatgctccagccacatctggtaccttccctgccccagccctgggctccgatgcttctcaggaaggtgcaggcactcttgccctgactcctccttcttttttttttgagatgcagtcttgctctgttgccaggctggagtgcagtggcatgatctcggctcactgcaacctccacctcccggattcaagtgattctcctgcttcagcctcccgagtagctgggaccacaggcgtgcgccaccaacccagctaattttttgtattttttagtagagacggggtttcaccatgttggccaggatggtctcgatctcttgacctcgtgatccgcctgccttggcctcccaaagtgctgggattacaggccggccaactcctccttcttcctccagggtactcttcctccctcccggtggccacttcctctttgcttcctcctccaatgtgtagacctacctcctccatgcagcctcctcccctcccgccagccctggtcatgcctgctcttcctcctgacctatcatggctccggctgcttgcctggctggtcccagttcaacggcacctgtcacccacctcatgggtctgtggctatctccaagggctgcttctgaggccccctgagctgaccgctgggcttcccctcaaaccttggggacaggctgctgccctcctagcctgagatgtcacctccaggaaagcatggctgaaaaccatgtagcaacatcactcataggtgcacaccactgtggtaggcaggaactgagaggtggccggggctgcagctcatggatggaggttgccagacagtggtggtgtcggcttagaggtgagcctgctggcaagagctcccggccacacggagattgaaacgacttcagagctctcttcactcctcccttcctctctggtctccatgccagtgtggctaaggaccatttcttgtgcctgaaggacattagtcaaacttgttttagtttgttcactcattcattcaccattcattcattcgacaggtactgaagcatctactatgtgtcacagctattctagttggaggcacagccatgaacaaaacaggcagaaattgctgccagttctaatagggagagacaaacaaaataaagtgtgcgtgtgtgtgtgtgtgtgtgtgtgtgtgtgtgcatgcgcacgcatgtgcatgcagtgagagctattccaggcttgtgatgttgagggtctacatttttggtcaaaagagcattcacagctttctctcaggggcaatggatccagctgcttgctgaggttaagtcagcagcaacttaacacggctttattcagcatgacgattcttcacttgggtctgagcagccccgtgacacattttcattttctcccctttcagcccctttgaatggaagtgcttagaaacctggcatgtcagaaatacaggaggggccttcaaggacatccagctgagtggttctcaaaccagggccctaggaaccccctgggtccttgggtgggcgcagggggagcactgtgaagggagagtaaccactcctcagcttcccttctaccagagaaactccttttcacaaacggggcttctgttcgggattttatttggagaaagggattctggtgctaaaaaacaaagttgggtaacccctcattttactcttgtgaggtaaggtggcatccgggtaagagtccagacctggcatcaggctgcctgcgctggatcttggctctgcaacttccaacttatttagctctccagatctcagcttcctcatttgtaaaacgggtttgtagcaatgactgcttcaacagggctttggtgagggctggatagcgtaacctgtagcagatgcttaccaagtcctgataagtaggcactaaatcactcctatttacaaattttaaataaaaaaagagaaagaagtgatacctgttcttaagaacactcaaacacaagagaatccaaaaaccattttagaaaatttcagccgggcatggtggctcacgcctgtaatcccaacactttgggaagccgaggcgggtggatcaccttgaggtcaggattttgagaccagcctgggcaacatggtgaaaccccatgtctactaaaaatacaaaaaaaaaaaattagccaggagtggtggcacatgcctttagtgtcaggcacttgggaggctgaggcaggagaatcgcttgaacctgggaagcagagcttgcagtgagccaagatcatgccacggcactccagcctgggtggcagagtgagactccatctccaagtaaaaaaaagaaaaaaaagaaaaaaaagaaaaaaaaattccagccatactcccaagagtaactacaggtaaaacagtttggtatatgttcttccagactgttcttctagacatttgcaaatttgtaatatgtatgctcagaaacacttcttgcaaaaggatatttcactctccattctgctttgtaatttgctttttttcacttagtaatatatcataggctagtttcttcacctgttccagagcctgaccacattcctcttcatggctgtgtagcattccatcccagggaccttctgtcatttttaaccagtccccaactcaaacatatttaggttgtttccaagttgttgctatcacaaacagtgttgtaattaacatatttgtacctacttctttgaattcttgaggtttgctgcaggttaaattcatagaagtggaattgctgagtcaaaaggctttcccatttaacatttttataggtactggcaaactgccctccaaatagattgtaccaatttatactcccatccataaaggaggagaggggcctctctccacacccagtcaatgttggggatgacattctctctgttccctgccctgtgacagatgaaaaatgttgtgctttttttcttttctttcttctttttttttttcctgagacagggtttcactctgtcacccaggctggagtacagtggctcaaccacagcttggctcactgcagcctcaacctcctgggctcaggtgatcctcccacctcagcctcctcagttgctgtgaccacatgcacacaacttctgcctagctaatttttgtatttttttttgtagagacagggttttaccatgttgcctaggctggcctcaaactcctggacttaagcgatctgcctgccttagcctctcaaactgctgggattacaggcataagccaccgtgcctggcctgttttacattccttccttcaatgattcatgatgctgtctgcgtgtcccagtgtttcctggccattcatagtcttctcttctgtgaactgcctcatcacatcttttgtttttgaatgaggaagctgaggtccagagaggtgtggaggtttatccaagtttgtaaactccagttctccccactgttcctcttgccatctgtcgtgttggtggctcagtctccattcatttctcttttaataaaatagtacctgtccggggttggattcccccacagacagacgccgagtcaaaggttcaaattctcctggaggagaaatctcgttagagaatgaaggaagcagaaccaggagggggaagaagctctggatgagattttagggaaagtcctagctcaagcctgaacctgggccagctctcaggtatgaattccacctcgcctgtcctgcgtggaggcaaggaagcagagcggtcctgcttcctcacagctcaggctggcacaggaggccccagggagtgcagaacaggaacctaggctctgtgggagggtcttctctgaggtgaccaggggctcaggagtgaggcactaaagtgcatagtagctgggcacaaggacatgttaaaaagcgatgtgaggaagtctgggaaggacaccaacattgtcctctactgtacccccattttctttggggatccactcctcccttaccccagcccagccttttgggtttcagtggagcctcaagagagagccctgcctggctcaagcaattagaacattctatccctctggccatgactgatttagggttggatccacaacacaatctgtgccagtggaagtcaacccagcaactgtctggggagagcggtacttggttcatttttcactgctgtatagcactccactgtgtgactaagtctggctttatgtaccccctcacctgctggtaaacatttgggtgatttccggtctttccagctacggaaagtgctgctgagaattgctaagaacattctcgtatgcattgcccaaagcatgtgtacacctgggaatgaaattgaatgcaacattcaacttggcaagacaatgctccattgttccccaaagtgcttataacaattgacacatccaccaactgtgggtgagctgtttggagttttcgccaaaccacgataatgtcagatttcttaccttttgccaatttactgggtgtaagaagatagctcaccctggtcttcatttgcattttcctgattaatatgtatattcaccactcaccactcaggtttcctgcaaagttatttcttcccgattcctctcccactgtcctttctcacatagaagtcagccactcttctttgtttaagctcttccttctgtctggaaatgccccaaggaaactttccgcccacgcttccacacctggtcctgatggtacctcctccaggaagcctcctttgattcccctgtaaggggcaactcctcctcacggtccccgaggaccagcactgcgagatccctgaggactgagtcctaagtgtgtttcctctctctccttcctaccccagccaggctgatcaggtgactcctcaaagaacaggctcaaaatggtttctgtttccctccctcctactttgggtttaccccatgctcgtgacaacaggacgggcacaattatggattacaatgtcaatgtgaaccaataacccaaaacattgcccccaccctcatccccacagtgacttgccagagaaatccgggcagggcgtttcacccctgccacctccaaaggaaagccggtgggcactctgctcacattttctgtgcctgtcgtagagaaggatgagcatgcccatccatcagcttgtcctgggaacaccccagtagcgggagcgcctcagcttttcgtccctgctcatctccaccctcccaagctcacccacagccttagaaacgggcgaccgttccctggctctgactcagtgtgtggtgtttatctgcctgcgaaaaaccagaaattataaaaactcagagaaggcttcacctctgccaaaaaagatgattccacctcgagacacagctctccctggggctgtggggttggcagctgctgtgttcccgaggtttcaatgaaactgaatgccccaaaacaatgcatgctgatttgcaaacctcagatggaaccaaaattttcatttccccaccatgcactacaaaacaaaacagagattttggctcggatttttggctcagctcccaaacagcccagtgtgaaccagaacccaggcgtccccacggggtctgtgtgtcgggctctgcttctccctccgctcttctgtctccaggtcctgcagactgtggaggggacaggccataggaaaggattaagtctcctcatctaccactttattgttgatctagaactttctagaccttgaggattttgacaaaatgtgaatctccaattattttgtgcagcagacatttcagaggcagaatggtgggaggctgttgaatggagggtgcactggatactttaggcaaattactcgattgagcatagcctgtttctcctttgtaaagtagagaagacagtgcgtactttctccatttcactgttttcttctgtggatcaaaatgagacagcattaaagcactctgtggtaggggttgttcccagtcttaagacttcttggatcatgaaacatgacacaacatggatgaaacttgaaaatatgaagctaagtgaaagaagccaggcacaaaagaccacacgttgcatgattccatttatatgaaatgtccagaataaacaaattcatagagacagaaagtagattagtgtttgccaggggctggtgagagtgtggttaggggggattggtgagtgacagttcatgggtatagtgtttctttctggagttgatgaaaatattctgaaagtagacagcggtgctatatatagtggggataggagtgaatatactagaaaccattgaatggtacaccttatttttgtttcatttatcattattatttttttgaggcagggtctcccctttatcacccaggctggagtgcagtagcatgatcatggcccactgcagcctcaaactcttagctcaggtgatccttccacttcagcctcccaagcagctgggatcacgggcatgcaccactatactcagctaatttttaagttatttgtagagatggagtctccttatgttgcacaggctggtcttgaactcctgaactcaagtgttccttgtgcctcagcctcccaaagtgctgggattacaggtttgagccactgcacctggccaatggtacactttaaatcagtgaattgtatggactgtgaattatatgtcaataaagctgttataaagaagaaaagagcatatgctcagatcactagatattttgagttttcaagagaagcagtgtttcaggattaggttagctacctataacagtaacttcaccattacagtggcttaagtaagaaagaagtgcatttttacttatggagaagtcaggaggtaggtagttcagggctggttttgtggcttcttagagtctacagggacttaggttcttctctctcctgtgccattctcagccagtggcttccactgtcaaggccaattcagagttcaaaatggccacttgtttttatccaggcagcaggaagaagaaaggaggaaagaatgaaagccaccccctaacccttgcgccaccttcttctttcatctcattggccaaaactgagtcacatggtctcactttgccacaagggaggctgggaaatgtagtcttttagttgggcacattgctgcgctgtctaaaaatcaggatttgtaattaaagaagcagggaaaacatcagcttggtaaacatcagcatctgccactgcttttaggtgaaattctggttggtaatttgaccccccctttttaaaaataccttgcagaacaaactgaacacacctgcagtctggactcactgcaggtaggcctgctggattggctgtggctctgtggggagatgggagtgggaaaccttgtccactatggctttgcagatgtcagtggtttgaaagcagctatagttaaaataaggacagtgctgagtcactgtgaggtggtggagagagagaacacacaagtgcttggcaaacacagagagcacaaacacacgaagtcacagtgtggctctgccaccgcatggttcagacaaaagctctgggctctgcacaaaggctccacagcatccaggctgctgggcagacaggaaggggcacagcaatctgagtcatggcgcccttcctgttgtgttctgcgtttgcattttctttgaatataaaccaaaagcattacaaactatagatgtaatttggacatgaaggaacaaggacaaaaagtcaataattactcactctggacatgaccttgtcactgcctcaccttcacttccggcaaggcaagagccattcacgctactaatgacgtctcccgggaagatcgcataataagccttggtcagaaagctgtattttttgataggcaggaagcccatggacctttactgcaatgtgttccgcaggctgctctaagttgctgagaaggcctcttggggagaggaagcgggccttgggtagggtggcgtggcgctgtcagatgcatcatgcctactccccaggtgcaggaaggctcaggtgtgcaagtccagagggtcgaggagtgctgggccagcccaagacaggccatagaggttccagcattgtcctgagctcgcagagtgactttcttttctcattttcaaaagatgaggctgtgcgaaacttctttttggagcatctcccttgctgtcaaaccaagtctctcatcttctaggagtcagtcttttcatggtggcagatcttggagttagacaagcctggctcaatatacagctccaattatttattgtatcccaaaatgcagtggcttgaaacaggcccatttgattagatatgaatttgggtaggtggacctccatcagaaggtctttcggttccacatggctgtggttggggctcattcaggggtacttacctagccactggtgtgggtctagagggtacctggtggcttgggtggtgcctggaagactgggctcctctggggctctccacatggccttctcagcccagtagctggacttctgacatggcagctcaaagctccaagagatgggaaacggacccagagatggattcttagtccactgctgtcttactcatcctcaatttaaaagaaacactggaggcagtgttaaagattcatacccccaaacagccccaattttccatccccaacctgtatccatttcctttgaatgtcatatacagtagccttgacataagtaattccatcttagaagaagtctgaatcttacatttcgcaaggctctttgccaacagggaacagatgttttgcctgatcaataaagattgcaaccggccagataaggacataaccaaacacaccctgccactgtcagtcctcaccagaggactctgtggccataaaaagagctggacttccaccgctcataacagctgtcttgataagcgcctggcatctgcctctaaagactctgcctacatcaaagactcttccttgcaaagctgtgatgctgctgagctgcccaagccagaccagaatattctttttgttcacatcgctctccctggactggcttattaaccctttttcctatcccttttctcatgccatgttactttgtttgatgcgtaattttcaatctataatgtttatatattgataagtatgttatgtatggcttgcaatactgactgatctgtgaagtggcttgagcctgtgtgaatgccaagtgctaaaaattgtctcctcctctttgggaactccatagagctggtggcttttatgatcgaagtagcattaaaaaaaaaaaaaaaaaaagcctgacattgtggaaagatacaaacaaacatgtgggagacttgcttatctctggccttgaaccactcatggtaaatgtgactttgcaattcctcccaccaaaaggtacagtctatttccccaccatctgactcaggccttatctatggcccatagaaagtgccagaaatgatggtgtgttaattccaagcctagtcctcaagaggctcttcagcttccctctctccctttccccaaccttcccataccctgatccctgtgattggcataaggatatatgcccaggttagcctgctggaggaccaggctcctagatgagccaggggccgctgaccttagccaatggcagacatgtgagtgagcctgttggaccacaactgcccagccaagcccaggccagatcggcagaatcgccctgtcaagctgccagatgccagtggcattgtaacattttcatttgaaaagagaagcagccaggtgtggtggctcatgtctctagcactttgggaggctgaggtgggcggatcacctgaggtcaggagtttgagaccagcctgccaaacgtggtgaaaccctgcctctactgaaaattaaaaaaaaaaaaacttagctgggtgtggtgacatgtgcctgtaatcccagccactggagaagctgaggcaggaaaatcacttgaacccaggaggcagaggttgcagtgagctgagattgggccactgtactccagtctgggcaacagagtgagacttagtctcaaaaaaaaagagaaccattaggaacaaattaaactccaaagagtgagaacagtgggatttgaagccttgtggcaactaaataagaaggtattttagggcaggcaacccccatggcctgttgggaaccaggctgcacagcaggaggtgagcagtgggcaggcaagtatttctgcctgagctccgcctcctgttgggtcagcagtggcactagattctcacaggagcgtgaaccctattgtgggttgcacactctgtatgagaatctaatgcttgatgatctgaggtgggagagtttcatcccaaaaccatccccctcccacccccagtctgtggaaaaattgtcttccatgaaatcagtttctggtgccaaaaaggttagggaccactgttttagaggcaagggacccctctctgcctctgatccccaaatgcactgactcctctcaggtctgcaaacctaacgctgcctgggtccaaatagaggttcccaactagaagtgattttcagatccttagtaactggtatggcacgggccatcagccattggaatacacccagccagggccctcatcaagtgcctactgtatgccaagtgctgttctgtgtgctggggatgtgccagtggaaaaaagtccaaatcctcaccacaagaagctgttgttctagtggaaaggagcagatgataaacaactgattaaatgaaattcatggcggcagatggcagtaagagtcatagaggaaatcaaagccgggtaaggggaaccacaagtgctgggcaatggtggctacactttgagtaggtggtcatggaaaagctcatgaaggtgacatttgagcaaagatgtggagagagtggagccacccagacatctgggggaacagggttccaggcagagggatgagcatgtgcaaaggtcctgaggcagtggtgtgccaggcacattccaagagtagcaaggggctgggtgtggctactgtggagggagagagggacagtgggaggagatgagaggcaacaggacaccatctgggtagggcctttgggagactgcgaggacctgggctttgctccagaggacacgggaagtcgctggtgggctctgagccaaggagggacatgatctgacactccagctgcagtgtgcaaggaggaagcagggagacccctgatggtccacagagtgggaaggtggcttggatcagaggagaagggcagaggtgctcagatcccggatctgtgttgaagacaggattttggtgattgaacttctttaattcccacaacaacccgataggaagtcacatttattggatgtgaaaacagctcagagatgacagaacttcctgaggcttgacgggagcagagagtggaggggcagggcctgaccccggtttccagatccctgttggttcttgtggagtcaacagcctggtttggtgatggccatcggggctcccagaggaagtgacattgatgctgagacttggaggacctggaggcatgagccaagccgcagccctgctccctagagatcgccgtcttcagaaactcccaggcccctgctctttcaacatctttcagcctgacgtgtggccaaagcatgacaaacctccatgggtgagcacaaacgcaggcgcctcccctttcagggccagggtggagaggaggcagggcgcgtagagaagcaggaggaatctatcttcatccccacgattccttagagtcagctgacactgaggcctgggcctccctctgctcgagttaggcttgggagggccccaaggggtgtgtaggagcctgtcaggccaacagagcctgggctgaggtaggtgtcccaggcagaaggagtgaaggtgtagaggagggctgggatgggaggtgggggcagagcaggaaggggctgcccaggatgtggagcttatcttagaggccactgggtgcctgtgaagttgacttttctttctttaagagacaaggtctcgctccattgccgaggctgaagtgtggtggcacaatcacggttcactgcagcctctacctcccagactcaagcaatcctcccacctcagcctcccagagtgctgggattagaggtgtgcaccactgcacttggccccagaagtgggctattttttaaagtaagtttttattaaagtcaaacacgcatacagaggacagtacagtcctttttcaagtttttttgtttttaaatcttttatttcttttttctcctggagatcatggaacacaggatgtcctcacactggatacacctgtgcctcctgcacctgggtgaagaagcatcacagctaggcccccagggctctttgagcctcctctcaaggtcaccactctctgatctgctcctatgtggtggttttgcctgaggtgggctgttttggcatgtgcccttcgggtctctctttgggattctcccaatggagggtcactgagcagtatgccaccatccgctggatcacaggccctctatttgttcctccatgatgggacgaatagggtgactcatttgggttgttgtctggatggggctctcatgagtggagctgctctggctcttcttgcatcctgtcccttcttgcacatctgtcaggtgtctgcctgccctggaacgcctgggtcctggggtagatgtttgttctgtgatgaccgatattgccagacagttttcctacatggtcgtaccagttcatgtggaagtgttttaactgatgagcagccatcgtattctctgttccctgcaccccagtgctgctctttgtcatcgccattgggcctctccaggaccctgcccaccacatggtgggtggatccacacacatgtggttggccacttccctgaccgatgggcagcatatgacattggccactctgggcagtgagaccctcctctctgctcctggggcctcaccccctcctgggtgcatttctgccagggcccatcaaggccttgtacccattgcgagctcctcagtttgggccctctctttcttacttcccacagccatgggagatcttactcactccccgagcttcagtcatggctgtgtcaatgcctccctgtcatgggaccctcttttctgagggttagccctcgccacccagcctccactagacgtccctcctggccacaccctgggctctcagactccctgcatccagaacaggacctgccatctgcctctcaacctcgccttcctctgtgcccacctggtgacctcagaggggctggtgggccacctcgctgggcatgccagtcctccctctgtggctcagccagtccctggccacatgatgtccattctttctctctaatctcacaaatatttcctctgctctctacccctgcagccactctgacttcccctgttgaaaattatcactcctctctctgtgtcccctcaatgccatacatcgtcaggaacttctactcatcacaaaaggacctcccatgatggcctgaaaaaagacaggaagaggggctcagaagatggctgatcagacagctgtgtgagcctcacagccatggcaccctccccagaggtttctgcagctgccaccacctccttaatgacagacaagcttggcctagacaacctcgcctgtgtgcctggcagaggacagtcagccagcaatcagcccagggaactctgtctggccagagcaaccaaactaggacacagccctttgagcaatccagcaactcgtacaaccacgtaggaaagctgtccggcagcatcggtcatcacagaacaattagaagcaaatctttccaaaaataatcgagctttgagtgttcttcgaaggataaagagtgggagtgtagtcgccaaccgagctaaccagggcaaggaaaattctgaaaacatcaccacccctgaagtctttccaaggttgtaccacctgatcccagatggtgaaattaccagcatcaagatcaatcaagtggatcccagtgaaagcctctccattatgctgatgggaggcagtgaaaccccactggtccgtatcatccaacacatttatcatgatggggcaaatgccagagatgaccagctactaccaggagacatcatcctaaatgtcaatgggatggacattagcaaagtctctcacaactacgctctgcatctcctgcggcagccctaccaggtgttgtgactgaccatgctgcacaaccagaagttctgcagcaggaacagtggacaggccctggatgcctacagaccccaggatgacagctgccatgtgatttgcaacaaaagtagccccaaggaacagcttggaataaaattggtgtgcaaggtggatgagcctggggtgtttatcttcaacgtgctagatggtagtgtggctgattgacatggtcagctggaggagaatgattgtgtgttagccatcaatggacatgaccttcaatatggcagcccagaaagcggtgcttatctgattcaggtattgctggccctcttcaccactgtatggacttatgcaatgccaagaaggtagaaagctgcactatgatccagtgtccagctctgaaaaatgctgctccttgtgtggtggcatgtttgactcctacctctctgctcttggaagttgctggcctatgttgcatcctgatggtaccagcagtttttatcagccataacaatggcagcagcgggctgtctggagtagctgctgccatcacgctggctgcagcagggaggcacagctgggactgcacactccatggagctggtgggaacctgggacaagtggaagccccgccccttctgagttggtggggcaggagttccctgggtgcagccacaactgcccaaactgtggctgcagacctgggcctcccgggccatggagcaggcaggggcccaaccccaccagggcagctgcagtccaccccaaccactgctgtggacccaggcatccctgcactcttaggggcccaggaaggctccccctgccctagcaggcttggaagtacctggcttccccctgctgttggcacccactttgatcttggagcaaagttggggccaagcccaggcactgtcaaggcctggccaggtatacacacactcagtgcaatgctgacatgccagtcccctgctgcctcagctgtctccaaactttggacaccagcaagcataagagagaagccaatggggtacagatggtagctcagtgctggcctgcaggtgccccttggcacctacagcttggccaccatgaatggcagcaggaggcaaataggttcctgggtggaagagggtgggtctctggtgaggccctaccttcaggccagaaagggcctgaaggctcggggccaggctaccagttccatggaccaaagtgggaacttgtggtgctttttccagatccccccatggctgcccatggaccaattggcactcacttcctccctctgagacccataaaacccccagactcagccagagctgagcagatgttgggaaaaccagctgcagagaggagctacccattccagggtctcctctctgctgagagcttcagagaacgatgggatgacctgcctgcagaaggagctacccattccagggcctcctctgagctagtctatcactcaataaagctcctcttcaccttgctcactctccacttgtccacatacctcattcctcctggatgtgggacaagaacttgggacctgttgaatggcaggtctgaaaggtctataacacaaacagagctgaaacatgccccttgtttgtgacattgcaggtgaggagcaggagagaagagctgtaatccttcagagatcccagacctgggagctccctgagccagggctgtgcctctctctttgggatgctgcagttcctggagtctccaagcttccaggcaccactgtgtcccctggcggcagctatggaagctacttgcattgcacctgatccagctgcagcctcacagagagcctgtacccatgctggcacctggagttgcccgccctgctgcagcagccggcgtgcctgtgtgcagtgaccagaccccatgctcattcactcacgcacccctcaccgccccatgcctggcttgcccttgccaggcatgggatccaggctaggaacatgagccggcatagcctgccaggccaagtgggcagaatgagcccagagggtccaagcaaaactcgggcaaaaggtaccactgaccacagaggtttctggctagaaaagcaacacctcaaggatcccataacattttggagggcttgtccaggatctgcagaagggtgagtaaaagcagatctactctttttattttattttatttttattatactttaagttttagggtacatgtgcgcagatctactctttctgtccttttttcaaagtctctaaactccacaatagtcaaaatgaaagaaaaataccaggcctctatcagccagttaagagcaactagtgtggctgccagacttaggacacggaggacaggcttgctggggaggacactggcaaccctccattaccctcagatgttgggaatgttggctttgttccaaaccagttttctttcacagaggtctagccattgtgtgggaccagaaggaggtcctgaggcaactgagggtatctggccaaggctaccctttggcctaattcaaaggcccgtggactaactccagtccctgaccacctgttacagtgtcagcactaggacctccggtctttcctaacattctttctttctttcaggatatcaaggttcctatttcttctttatgtaccatgttaaatgttaaggatgttgccaggcacagtggcttatgtctgtgccagcactttgggaggctgaggtgggtggatcacctgaggtcaggagttcgagaccagcctggccaacatggcaaaaccctgtgtctactacaaatacaaaaaaattagcccagcgtggtggtgcctgtaatcccagctactcaggaggctgaggcaggagaatcgcttgaacccgggaggcaaaggttgcagtgagctgagactgtggcactgcactccagcccaggtgacagagcaggactctgtctcaaaaaaaaaaaataaatgttaaggatgttgttgcaaaccagagctagtactggattgaatgagcatttggcttagtcatcagaagtctaaaatggaaggttaagagtagcacagaagccaagtgtgccttggtatctgtacataaatttgtggcaaaaatgttcttgtcatttccttgggtgataacttagtgccaagcaccttgaggcacagaaaagaagcacggcctcaggaaggaagcctttctgtaaacgcgggggcaaatggtccatggtcccatatgtgcaggccttctttgccttgcagggtagcctggacctttgctgatgtaggattgattcagccctcctactggccatctcaggagaggctgcaaggggcaataccagggaagcaaaccccagaagtacctccagcaggagaatcaaccccctctgctcctccctatccaggttatctctcaagcttgccccagcctaggaatcctcgttttaggcaggtcccagtctcaactgcccctacaacagatgcctggtgaatatggccccattgaggtccaggtccccttttctctactagacttaaggcaaattaaggcagatcttggcaagttttcaggcagccctgacagggatatagaggctttccagaacttaatcaaaatatttgagctctcctggaaggatgtcatgttacttttgaatcaatccctgaccaccactggaaagcaggccaccctgcaagtagtagagaatttgggggatgagctttgtatcttatatagggccaaggaagggaatgagacttatatgattggaaaaatagcagcaccactggaggaccctaaatgggaccctaaggatgaaatgggagaatggagggggaaacacattcaggtgtacatactggagggcttgtgaagaactaggactaagcctctcaattcctccaagatcgccatgatagatcagggattagatgagaatcccactgccttccggaaaggctaagaggggctttggtaaagcacacctctctagctcctgattcagtcgagggacagctaatcctaaaggacaagtttatcacaaaggtggcctccggatatcaggaagaagctacagaaacaggctataggacgagatagtactttagagaacctcctaaaagtggccacctcagtcttttacaatagggaccagaaggaagtccaaaaaagagaaaggcaatacaagaaaaaagcagagcctctaaaagccaccttgcaggctcacaaacctcagagtccccaagatgcatgaccgtgaggggcgtctcaggtctttcctccaccatgtcaagagtcatggtaaaaatcactgtattatctgcccctccatgagttcaaaagctagaagtattgaagtattggccatttggcgtggctaaggtcaggtaataagagatttaaaaggacttcttaaagaggagccctatggttaaaagtcaacttttgggaggccaaggtgggcggatcatgaggtcaagagattgagaccatcctggccaacatgctgaaacccagtctctactaaaagtacaaaaattagccagggatggtggcacacacctgtagtcccagctactcaggaggctgaggcaggagaatcgcttgaacccagaaggcagaggttgcagtgagccgagatcgcaccacggtactccagcctggatgacagagcaagactctgtctcaaaaaaaaaaaaaaaaaaaaaagatgggtatccaagctgcaagctataggtcaggttaattaaagatggatgtccatgctataagtatatttaaaaggcttttgttgtcttttctcttcatggatcttgtttttctggaaaaaggtttttttcttctcagtcgactgaattatttttcttcatttttgtcttgccactcttaatgcacacatgagaggccccatgagaacttctgacggctgggactccttgggaaaatggaggaggcgccatggaccctgttttgggaaaaacctattttcctcacagaactccagggattagaagcagatgcatccctctcaaaatttgtttttgtcttccacctaggcctacctattagggcttagaaactgcacgttttcctagccctggttcttgaaggactccaccccaaggccagtaatccaactaggagattggcaaatccaattaggagattggcaagtgaaaaattttacaactactggatcttcttctgtctgtttgtgtagttatatatgtgtcaggtgtgacacattaaaaaaaagctctaattgattggcttaaagaaaaataaatgcctaagtcaaatattttgaaagaaagataaagctgtaatgccttttagttcacgtgactttcatctttgaaaaataaaatatcttcaacatgtagacatacggtccaaattatgcaggtcagatattaggtttgctaaatgctttaaaggttataaactgcttctttcatttttgaaaattgtttaactttcctgctttacagttttgtagggcctagggacatagagagttaactacatccatactggaaagagtcagaccttgtctgcaactaacacataattaaaataacttaccaggttttacaccaaaattaaaaattgccaagagttaccattataacatgtaatttgagactacttaaaaggagatttacatgtaaaatgtgtaaggaaagtaaaatgtgtctttagtaaaagaatataagaaggcacggaatgtaaatttttgcctagttcagagggttaaaggattgttttaaattagataagataaagctaaaggtttaaacaagttatgggaggtttttaaagattaatcttgaaaaagaaatgctgtgtgtgaacatatcgactaaattcacaagggcattatttggtttttctgtaaattgaacattggaataaaagcacaagagtttctcagagcactgacctcctctttaacaaagatttgtaaagggttataaaaggattaggagaatctcagctcatggtcaaactgattaagattttcaggtaatgttaaaggatgatgaaagatttttgtttgccttgcaaataaactaccgaaagaaaaagggaaaaacaagagacagattgtttagaaagctaagtcttctctcttaatgtgtaaaggtttttaccttctttttttgagtcagcattttggctaaataagtgacttatggtaacctggaattctatttcataatgtcaagtgttttaaacctttaacacatttgataggctccccaaaatcaaatttcagcttcaaaattgtcttttctgacccctggagcattcaaagcagaggtaaacaggattatctgacatgtttagtcacatggaattgtcaaaataaagtggtgtttgatcttcttcaggttacattttagtgaataatgttaatatgtgtttcaaaatgtatgggatttctaaaattctgatgtctgagtatgtgttttcaatcataattagggttattgtgttaggttattgttgaccacagaggtgatcaaatttctttgccaatcatgtttttgactgtgactaccttaggacactgatattcacaggcaattgctgtcttgttttaatcctcttcaaaaaatggattatagtcctcgagtgcaggtttctgataacttcggagattgtgaacaagagttgactgggtggactgaacttatggaagactgaagtaatcttttttgactttttgcttggaacattgctgatcctttattttgtttttcagaatcaaggaagcttttcttttgagttatttgtcacctttgacaattatggggacaaccagtgatttctgactgcagagagtgggcagaatgagcccagtgggtttgagcaaaactcgggcaaaaatggtaccagccacagatgtttctggccagaaaagtgacatcccaagtatctcataacagtagtggattttggaaagaaaagagccaattacaggctgaacacaaagcaagatgcttgctctgcaagaagtcacagtgcaacgctcctggtctcctccttccagctataagagatagcctttgttatttaaaaatgggtaaatataaggtataaggaagggatccagtttcagcttcctgcatatggctagtcagttttcccagtgccatttattaaatagggaatcctttccccatttcttgtttttgtcaggtttgtcaaagatcagatggttgtagatgtgtggtattatttctgagggctctgttctattccattggtctatatctctgttttggtaccagtaccatgctgttttggttactgtagccttgtagtatagtttgaagtcaggtagtgtgatgcctccaaactacaatgagataccatctcacaccagttagaatggtgatcattaaaaagtcaggaaacaacaggtgctggagaggatgtggagaaataggaacacttttacactgttggtgggactgtaaactagttcaaccattgtggaagacagtgtggcgattcctcaaggatctagaactagaaatactatttgacccagccatcccattacgaggtatatacccaaaggattataaattatgctgctataaagacacatgcacctgtatgtttattgcggcattattcacaatagcaaagacttggaaccaacccaaatgtccatcaacgatagactggattaagaaaatgtggcacatatacaccatggaatactatgcagccataaaaaaggatgagttcatgtcctttgtagggacatggatgaagctggaaaccatcattctcagcaaactatcgcaaggacaaaaaaccaaacactgcatgttcccactcataggtgggaattgaacaacaagaacacttggacacaggaaggggaacatcacacaccatggcctgttgtggggtggggggaggggggagggatagcattaggagatatacctaatgtaaacgacaagttaatgggtgcagcacaccaacgtggcacatgtatacatatgtaacaaacctgcacattgtgcacatgtaccctagaacttaaagtataaaaaaaaaagggtaaatataaatgaggctgctggactgtgttgtttcccttctttggtctctgcttagttccatcatatagatatgattggcagttttgagtcaaatctcaaaagaacaaagaaaagtagtcattaaacaaaataacagggaaaaaaagtggcccctgcagccacttcctcaggccaggaagggtggcccttgcccccgagtcctgaggatgaggtggaatctgagttctccacgtggtagtgacaagggaccttctcaaatccaaatatgctcacactcttttgccaaaaccgtgaggccagccacgagggaaaccacagatggatctcagcaccataaagagaggtgccagacatcatgcactcagggtggaaccaggagggggtgcctggtgccaggtgctcagcgctgtccatgaagttgtcttgcaaaagaagaaagacaaagctgggaacctggggctatgcctctggatctcccagtttatggagagcgtgtgggacaaaagaacacacaaaacacaggggaccaaaaccaaattacctggcttcttcctggaggaaagaacgaaaggacaaagagggcggggaaactgcagacccaaagaggcttcagggccaagtccaccaaccccaaggcgtgggcctgtttgggtcctgaactggcctgaactgaacaaaccaaccaagaaacactcacttaggaggcaatcgtggaaatgcaaatactgactagatacttcacaatattaataaattactggaattttttcagatgtggttatggttttgagcttatgtctgaaaaagagctgtttcagaggtacatgcagaaaaatttatagatgaaattatgtggtgtctggaatttactttaaaaaatttcagttttttgtggggggaggggaagtggaataaatgaagtaatattgaccatttgcagataattgttgaagttcgatgatgggcatgtggagattcattatcgtattatttttacttctgtgcatgtttgcaattttcctcaataagaagtaaaacaaataaataaataaaagagcatcctggttccccagcactctctgtataaaggccacgcttgtaatgtgggtgcgccactttctccctgcagctgtgccagctccctccatgcacccccgcttcctactctccaggtttgatgagagcttctgggcagctcccttcactgccttgtgctttctccctttaacctttatttattatctttccaaaaggcaagcattcatatggttcagaacgcagcactgcacagtaactactctcccttcctcctcgtccccaacacgtagtgtcttagtttcttgtttctccttctagagatttaatgcatatgcgggcgaacagaaatagaccctcattctctgtctccccctccctttttacacaaaaagtagcctgatgacaccctactctgcgcctcactttctcactatattctggaaagctttccggatttgtccactgtgagcatcttcttatgcagagaagatgaaacctcttatgtagagatctcctaagagaggtctctgtgagaccttgatatggtttggctgtgtccccacccaaaatctcatcttgaattgtaatccccacgtgtcaagggtgggaccaggtggaggtaatcagatcatgggtgcagtcttccccatgctgttcttgtgacagtgagtgagtctcacgaggtctgatggtttttataagcatctggcatttcccctactggcactcattctctcacctactgccctgtgaagaggtgccttctgccattattgtaagtttcctgaggcctccccagccatgtggaactgtgagtcaattaaacctcctttctttgtaaattacccagtctcgggtatttcttcagagcagtgtgagaacagactgatacagacctcttatgcagttgcacaacattccgttgcgtggctgcactgcattgcatttaccccctctcctgttgatgggcagttaggtcatggccagtctttcctctttccaacagtgctgtaaggaacaaccacatgctcacatcgtttctggtgctttctctttaacttcccccacctgctgcccctcccccaccagcttttgcccctccaattcctgtttacccttcagctcttgaattaggtatcactttatctgggacacattctcagattggagacagagaggtggatgttaagaacaaaggctctaggctgggcgcagtggctcacacctataatttcagcactttgggaggccaaggtgggcagattgcttgagcccaggagtttgagaccaacctgggcaacacagtagaccctggtctctacaaaaaatacaaaaattagcagagcatggtacaaaaattagctgggcatggtggcacatgcctgtagtcccagctagtcggaaggctgaggtgggaagatcacctgagcccaggagatccaggctgagccatgattgcacccttgcactccaggctgggtgacaagcaagactctgtctcaaaataaataaataaagactgcagagtcagggtggagcttgactcttgcctcttcaacttaagaggaaagttacttcactcttctgaagctattttctctctgcaaaatgcacatgataacatctctcctgatgggttgctttgaggattatatgagatactatatgtgtagagtcttagaacaccactgggaccatagtagatgccaaataaatgatgctatcatcatcatcatcatcatcttcttcatcatcgtattgatgaacttttcctttagaatgccttctccagccttcaaaatacaagtcattgttaaggcctaagttacatgcttctcaacccatttctccctaatccattcaactgaaaattaatttctctttttttccatacccctgcagtatccaaatggaacagccaggaattttttggctgcaagtgacagaaaacctgcccaacagtggcttcataatatctggagttatttccctcatatattaagaagttgggaaatgggcaggtacaggcattgattcaactacccgtggaatcattaaagaccaggcaaatcttttcttccttctcctccattgtcctcatagtgttgcttattggtctttaagagtattgccttttaattacaatgtggctgctgtgcctccagccattattgtgcaactttcaaagccaggaagcagggacggctgcagtaatgcctttcccaaaagccctgtcagacatttccagcatccagaactggatctaaagcccaccccaagactgggacttccttctctgaaatctagagatatcaacttcctccctgagtaggatcaggattctgagttctgtcaataggaagagaagaatgcctgggaaggtcactgtggtgtctgccacattcagacactcaaactcaggctcctgtacctctcttttgacaatgatagctttctaccttttattatagttttatctcctttactaaactgtgggcttggatccatttccaagtacgtccatatgcccccaagtgccaagcacagcttctgtagacagtaagagctcagccagcatttgtggctctagggatgaatggacaatctcaaagacaccatctgattctagcagacaaggattctgattcaagaagctgcctgggaaatctgagttctgtgtgtgccagtgacacggccctaagatgcccaccttatgctaccacccccaggggctttgagtgtcttcttgtggctgtgacagtgaaaaccaaacccctccctcactctctctcccattcctctttcttgtacttatctcctataccctcctagggaaccctaggattttatctccatgcttgtgtgtgtttaggttaactggatcatggaggatgagtcacctgtcagaaatacgtggagaaaaggaaattttgcctgcaaagctctgattgtatcatgagcacactgtctgaagatgagagagaccaggctgtttattgcttttgggaggcatcagagtccaatcggcatgtgagtcacttttcagaggctggatcaacgggcagccccctggctgcaggagctgagcctgcctcacctcccaagagtgctgttgggctgtgagctggcggttaagttactgccttgacctccaaagtcccagctgcttaagaagccttcatcacatcaaatagtgctgcatcccctcaaggtggtaaatgaggtggctggtggggtggccaggctcagcatttgtgtcgcagctgcaaatgacgctggccaggggacaatgaatgaggtgacgatacagatggagggatgaaggggtccatctggctgtggtccccctcctacccccactccccttcattcttaagaatcaggaagtgggcaacagtgggtgattcattttggtgagtggagtatcagctggtggccacattatagttggctaaaattcaggatattaaaacaataaaatacaataaacacgccggtgcggtggctcatgcctgtaatcccagcactttgggaggccaaggagggtggatcacttggtcaggaggtccagaccagcctggccaatgtggtgaaaccatgtctcaactaaaaataaaaaaattagctgggcacggtagcagccccctgtaatcccagctactcgggaggctgaggcaggagaatcacttgaacccggagcgggtggaggttgcagtgagctgagatcgtgccattgtactccagcctgggcaacagagtgagactcggcctcagaaacaaaaataaaaaacaataaacactaaaacgaaatgggatgcagccggggctgcttgtggggtgctggttactggagttttttgttgttgttgttgttgagacagagtctccctccgtcgcccaagctggagtgcaatggcacaatcccggctcactgcaacctctgcctcccgggttcaagtgattctcctgcctcagcatcacaagtagctgggattacagacacccgccaccgtgcccagttaagttttttgtatttttaatagagacgggggtttcaccaggttacccaggctggtctcaaattcctgacctcaggtgatccacccgcctcagcctcccaaagtgctgggcctgagccaccatgcccagcccggttactggagttttgatggctggagtctgggagagtgggagtgagcagggagagtggtcttctttccttcagcatcactggacagctggtgtgactgtgtctcacttgagtcccagaacagtgagcactggagtcctggtttctgtctggctcattttacgaactgctttgtgtatgggcccatttcaccctctgcccttggctaagtccagcaaaacactttacctggctgtagaggaccccactttaggacagctcagccactctccttcagtgccgacccttccctctgtggcccagtgatacccgcctgccacacaggtaagctaagagtggtttctatagacctgacaggactggggcttgtcaatggagcactgtagcccagggtcattcagggctgcctgcgaccctgcccacggagaaagttctggtaccattaggcaagcagcagtgtcctcttggggcttggcataagttccctcaagggtctctctcaggcccccaattttatcgcccatcacttctctctgccctctcattgggctggcatagtcaggtggtctggggagggtggtctcacttaggaatcgccctctcctccccctaaaaggccaagaggcaatcaacttgaggcccagagggaaggaagcccaggccagtgggaaagaaaggaactcctttttttttttggaaacagagtttcacttttgttgcccaggtcggagtgcagtggtgcaatctcagctcactaaagcctccgtctcccaggtttaagtgattctcctgcctcaatctggctaagttttttctatttagtagagatggggtttcaccatgaagatcaggctgctcgtgaactcctgacctcaggtgatccacccaccttggcctcctaaaaaatgctgggattacaggcatgagccaccacgcccggccaagaactccttgttgagtcgcttctgatgtctgggctccatccttgtgggagactcccagctaagcccagggcttatagggccctgctgttttgttccagctgcagatggcagcagggctagctttctcgtgcctttagagtcccacacatctagggtttgtctgtctatattgtggactccgtgggggctccgggtctcatcaggcaacatggccgacgtgcaatacatatgtgttgaattgacattaaattcagccaggtataatgcccagaaagacaaatactgcatgttctcactcctatgtgggggctcagaaggtggatctcacagaggaagtgaatggagtgccggctaccagaggctgggaagggcaggagggagaggggatggagaggttggttcatgggtacaagcatacagttagataggaataagctctagtgtttgacagcacagtaggtgactatagttatcaataatgcattgtatatttcacaatacctagaacagaagatttggaatgtcctcaacacaaaggaatgatatgtgtttgaggtaatggaaatcctaattaccctgacatgatcattacacattgtacgcatgtatcaaaatatcacgtggaccccataatatgattatgtatcaatcaaaattgttagccaggtatagtatggcagttccttaaaaacttaaacataggctgggcgttgtggctcacgcctgtaatcccagcactttgggaggccgaggtgggcggatcacctgaggcccggagttcgaaaccagcctgaccaacatggagaaaccccgtctgtataaaaatacaaaattagccaggcgtggtggtgcatgcctgtaatcccagctactccagaggctgaggcaggagaatggcttgaacctgcgaggcggaggttgctgtgagccaagattgtgcaattgcactccagcctgggcaacaagagcaaaactccatctcaaaaaaaaaaaaaaaaattaaacatagaatcacaacatgacccacaattccacttctgggtatatgcccaaaagaattgaaagcagggacttgaacagacatttgtttatagttgtattattcaaaatagcaaaaagatgggacaagccaaatgttcattaacagataaatatgtaaacaagatgcagtatatccatacagaaaccaggaataaaattctaagcccccctaaccaactgaatggacctcctcttggccaagggcattccaaagttaatctgaggccaggcacggtggctcatgcctgtaatccaagcactttgggaggccaaggcgggtggatcacctgaggtcaggagtttgaggccagcctggccaacgtgataaaaccccgtctctactaaaaatacaaaaattagccgggcgtggtggcaggcacctgtaatcccagctacttgagaggctgaggcaggagaatcacttgaacctgggaggcagaggttgcagtgagccgagattgtgccactgcactccagcctgggcaacagagagagactctgtctcaaaaaaaaacaaaaatgaaaacaaagtttttgtttggcggtccagccatgatgggaataaggggtcaggcatgcctccttataccctccctactttgaaattcaggcataactgaccaatattaacattaaaacagagaccttaagagaatttattctttctgaagcctgctacctcacctgcataataaaattcttggtctccacaacccctaattttaacccatacactcccttctattgattccaggtctttagataaactctttcaaccaaccgccaatcagaaaatctttgaatccacctatgacctggaagcctcctgaggctgtgtcacgggcatgtccttaaccttggcaaaatggactttgaaattgattgagacttgtctcagatactttgggtttacacatacaatggaatatcattcaactttaaaaaggaagaaatttttaaaggaagaaaaaagaaaaaggaagaaaattttgacacatgctacaacatggctgaaccttaaggacttcatgctaagtgaaataagccagtcacaaaagaacaaatagtaaatgtgtaattccacttatatgaggtacctaaagtagtcagattcatagagacagagagtaaaacagtaactgtcaggggctgggggaggacgggatagggagttactgtttaatgggtatagagtttccgtttgggaagatgaaaaacattctggagatgaatggtggtgatggtcccacaacagtgttaatgcacgtaatggcactgaactgtacacataaaagggattaagatggtaaatgtgttatacatttttcaccacaattgaaagcatatattatttttaattaattttagcctggtaatctctcagtgtcaccttgttttggtgctgctctatgtagattgttcaacatagtacaaaacacgactggaaaagatcaatcttgctgacatttactcgggcttaagatatggctcaagggccttgctcttttggtcttgtgcaaaccgcccacagtccacctgctggctggatgccctcattgcaggcaaagcaccaggatttcttataataccacccatagacccaagtaggatcctggtggcctcgtggtaagctgtgacaggaatgcacaaggatctcctggcttgttggctggcatcgctggcccagtgatgtgaggtgaagggattctttgctctgactcagctcaatccccctgtacaaagggactaggtgggcttgctgtgcttttggaaggaccagaaaaatctgcttccttcactcactgggagccatgtattctctttgacttttgtttgcaggagcaaaacaaacagatgcttggggaaaaccaaccaaaaaggggggaaggggaggctggtgctggctggcaaccttgactcagcgctcggcaggaggtccattcggaacagaaaccctcaccctgcactttcctcacccagccctgaaatcacaaacaaccccttggccagggtcctaatgagcctctgacaaacacagcccgccctcctgacacagaaaagacaattagacatgcacaagtggcctgtgaaatgccaggctgggcacttgagctctccatgaatggcaccccctgtaccctgggccttctcggaaaaacattgcttgggttccttacgggtggtaatggctaataatgcagagagaacaccgtgttttggtttcaggcctttggccagggcggtgagagaggggtgtgtgtgtgtgtgtttagtgatggtagtggggtgatatttattttcatttctccatcataaaggaattgaagtcctatagcatgtcagcaatgtcaatgtttcagggtgaaataaacaagtaaaaggtgttagcgttcagatgagctctagcagcctgtgacgttaggaaaatcgccaactcctggggcctcagtcttctcatctgtaaaatgaggataataatagaaaccaccttccactcatggtgattgagtgagccatcgcaggtaaagcactcagccccaggcctggaacataggactcattgaacattggctattaacttaaaagcaagcgttatgcgttttagtctatttaaggagccacttttgaatatctgcttgtgaactcctatatgaagttggctgtgaaaacacagaaaacacagtctttatgctcacagagcttgaggacaaccagggtgacaagaaaaccatccgggcagggccagctcaatgctggcgcgttggcaccaaccaggagacagctgtggcttgctttaggtctgtttgtttcttctaatttgtgttatcttttttcctttggtggtggaggaagggcggtttctgtaggccgcagacagcagggtatggatcattggtctggtcaggctttaatcaagtgaaaatctgctcttcatttgtttgttactgctacaaagcacatgattttcttttttttttttttttttttccacatctgttttttttgtttttgtttttgtttttttttaatttatttattttttattgataattcttgggtgtttctcacagagggggatttggcagggtcataggacaatagtggagggaaggtcagcagataaacaagtgaacaaaggtctctggttttcctaggcagaggaccctgcggccttcagcagtgtttgtgtccctgggtacttgagattagggagtggtgacgactcttaacgagcatgctgccttcaagcatctgtttaacaaagcacatcttgcaccgcccttaatccatttaaccctgagtggacacagcacatgtttcagagagcacagggttgggggtaaggtcacagatcaacaggatcccaaggcagaagttttcttagtacagaacaaaatgaaaagtctcccatgtctacttctttctacacagacacggcaaccatccgatttctcaatcttttccccacctttcccgcctttctattccacaaagccgccattgtcatcctggcccgttctcaatgagctgttgggcacacctcccagacggggtggtggccgggcagaggggctcctcacttcccagtaggggcggccgggcagaggcgcccctcacctcccggacggggcggctggccgggcggggggctgacccccccacctccctcccggacggggcggctggcctggcagaggggctcctcacttcccagtaggggcggccaggcagaggcgcccctcacctcccagacggggcggctggccgggcgggaggctgacgccccgacctccctcccagacggggcggctggcctggcggggggctgaacccacctccctccctgacggggcggctggccgggcggggggctgacccccccacctccctcccggacggggcggctggccgggcggggggctgacccccccacctccctcccggacggggcggctggccgggtggggggctgaccccccccacctccctcccggtaccgggacggctggcctgggcggggggctgaccccccccacctccctcccggaccgggcggctggccgggcggggggctgaccccccccacctccctcccggacggggcggctggccgggcggggggctgacccccccaccttccctcccggacggggcggctggccgggcagaggggctcctcacttcccagtaggggcggccaggcagaggcacccctcacctcccggacggggcggctggccgggcgggaggctgacgccccgacctccctcccggacggggcggctggcctggcggggggctgacctccccacctccctcccggacggggccgctggccgggcggggggctgaccccccccacctccctcccggacggggcggctggccgggcggggggctgaccccccccacctccctcccggacggggcggctggccgggtggggggctgaccccccccacctccctcccggacggggccgctggccgggcagaggggctcctcacttcccagtaggggtggccaggcagaggcgcccctcacctcccggacggggcggctggccgggctggaggctgacgccccgacctccctcccggacggggcggctggcctggcggggggctgacccccccacctccctccctgacggggcggctggctgggcgcaaagcacatgattttcaagggataagttgttaggatgtttttaattgtgatgatgaaattccagctcaagttaacttaagcaaaagtaaacaagcaaaattccaaaaagggagtttactttcttacataatttcagagaacaaagatgggtgtcttgctagcttcagtcatagctggacccaggtgctcaaatctctctctttctctctcttctttcttcattgtctgatagcttcaggcatacacagtaaaccctcagctcatgatttcagagtaagagagagcctcctcttggaccaacaactctagactgggaaatggggcaccacagttggccagacatgggttgcattcccccaaagccaggggataggttgaccagcagcttcacaggacccacatggggcagatgggatgcaaggctgacaaactatcagtgagactctgtggatagaaagcatgagtaggcgccaaacatttcacgtaagcagcgaatatgcaggcttcctctttgcatctcacccaactatgcttaaaatggcttgtctggcacactttgaggggtcagcctacttccttgcattcaaaaggtgaagagtttctaactctttgttcttgaatcaaaccaagtgactgaagactaagtgttccagatgggccaaccacgcagcagcatggtggcagctctgagatgctgcccagtgagccccagtagtcacatcctggagagtcccctcttcactgaataggacccatctggcaaccagtaggactgcagaaatgatgtccaaggctaggccataaaagacatggttcctgccttgctctccttgaatcacttcctcgggagcagccaactgccatgttgtaaggacacttaagcagctctgtagaggagtccatgtggtgggaaactgaggcctcccaccaacagccagcaccaacctgccaggcatgtgggtgcaccacctcagaggtaaatcctccagccccagttcagcctctaatgacacaaccccagctgataccctgactgcaaccccatgaaatccctgagccagaaccacccagctaagccactcctgaattcctgacccacagaaactatgaaataataaatgttcattgttgtttcaagccactaagttttggggtcatttgttacacagcagtagaaatctgatacaggcatattgtggtcccttcctcccttcccagggacagagtcactttggaaagcttccttggatcattttcaaagcacttctcaataactatcttagttcttgttacaaagtttcagtttcacaaatggactcacacggatatcacaggctgctccaaccctcaacagtgaatttgccgataaaacaaaatcagggactaggtgtggtggctcatgcctgtaatcccagcactttgggaggccaaggcggatggatcacctgaggtcaggagttcgagaccagcctgaccaacatggagaaacctcatctctactaaaaatacaaaattagccgggcatggtggcacatgcctgtaatcccagctacccgggaggctgaggtaggagaatcgtttgaacctaggagacggaggttgcagtgagccgagattgtgccactgccctccagcctggggaacagagtgaaaaaaaaaatcagatttccactgcatttacttccctctcctgtactagatatggaggtagttgaaattctaacaggaaggatgccttcaaagttcggtcagtctccctccttgttactgcatatgacgggtggtatcacacactatcacaatactgcaaagtcattgataacatgtggcaggagtgccctgggttctgaagccccatgaagtcctccaggcggtcttctggctgaagtagtgcctccctggcagatgagctagaattcaaggaagtctgatcctaggctgcttgcatcaagggagaactcggggaagaggtggatcctgagcacacccttcaatgccccccttccctgaggtgactgggacataccccacacataccccacctgggtcccctgctgttgcaaagcagtttccctccccctcccacaagccctcagtcacgtaggtgccagcacctgggcccctcccacagacagccccatgctgagcacctttctgatcctatgtcattgctggcgtttgcttttcctcccctctcaggatccagatgttatcattccccaggagctcaaactactccatctccctggtctcccatcgttgaactccaatcatggaaagaatgccatacaagctagtgctcctcagtgtaccagccaggactctgcaagtgacagaaagccccgcacacaggctccagcccatcctcaggtctctgcctcctgctccggctctggcttcctccgcatgttggattcgtatgggttggtccccagctgccctgtgaggcaaggcaggccttgatgttcacttgccatatcaggtcccgcctgcctctgcagaaaaattttaggctcctcaaggtctgggtccacttctactcctcctatcagagtgtaaataaaaacagtctcctcatcctgcccctgctcatataacctctgtgacaggatgctcactacttggagaagtaactctttttgcggagctggtctccgccccttctgtgactgccacccactgggccagttctgcctaatagcaaagaacactgctcaccaatcttctttcctttccttccttcccttttgcccataagtcaccgatggatggactggacccatgggcaacgtctgtggatgacgctgtgtttgtccttccacagggcgtggggctcctccaccctgcatcaggcacaagcctgcttttggggaaagtcccaccatctcattttcccttgcctaaaatagctacttcctttatggggaatgcagtgtggtggggagcaatgaaagggatgaggtaagtcatccacagatgcctggtttggaatcattcctgaaaaggtcagcgttttcatcagccaaacaggaggcagggcacttccggctggtcattaaccaaggcaaacagcgtggcggggaaagtcaaagccatagccaaccacaaacaaacaagtcatgtatcctctgtggaggtgactttcttctgaaggaatgtgtggttgtttgcagataatatcaaatccatttcacgtcagatcaggatgacagacagccagaggctattggggtctcacattaaatggctcttttatggtaataaattgtttccttttcacggttgcatgagcaatctcaagttttattttgaggtgtcaactgccctcagggacacctgccacaggtgggatcttgggtcctggccaccatatgtgagagagcagaccctggctgagtcactcagctgtggtcgcatcacctctgtccctgccccactgctcagccccatgcaggctggcaggggaggcctcctctcccccatggggtctccctttcttcctctcacactgatcattggaaagagtggcttgcatttgccacagtgctgagggctgtcagtcttcacagctgaggaaatgacatgatttgttgggagccacttgaaataaccagttccccagctggtctcgctgtccctgtgctggcagccctgctgacgtggggcctggctagacagaggtgggccttctgtgccctcacctgggccatccccaccatgcggtgaggttgggttgcatccagccaggaggcagctggcagggccctgtggcttgtctgaggacccaagggggaacttatcagagggcaagagagaaagagggctgaggggtggtatgtaagagggagggggctaggagagtgtagatgcttcctgaaaggtcacggattctattggaattcccagccaaacttcaggactgggaaacacccttcttaggaggtggctaggggctcaggctggcttggctcattcctggcctgcaggccttgctcctgagcacagggcaggggctgccggccccggttcagaatgggatctgaaagctgcctggaaagaatgggcctctggatcaggatcaccagggtgggacctggatatttcccatagtcaccagacgtgttgctcagagggaggttcctggccagcagctttgttggcatcacctgggagcttgttggaaatgcagaaccttgagctctgcccagacttactccctcagaatctgcatggtaaatgatctctgctgacccgggcactggggttcaaggacctcggccctgccaaatctgaaatccagagctaggccaaagtacacttgtggaatcaggatgctgaatctaagttaaatgcagaagcatcctttgagcaaaggtggtggagtgggctgaattatgaccctctcaaaagatgtccatgtctcagaaatgcagaatgtgaccttatttggaaacagagtctttgcagatacaattaagatcttgaggtgaaatcaccctgaatcatccaagtgggtcctaaatccaatgacaagtgtccttgtaagagaagaggagaagacacagagacacaggcaagaagaccacgcaaagacagagacagagattggagtgatgtggccacaagccaagaaacacctggagccaccagaagctggaggaggtaggaaagatcctccccccaagcttttagagcgcaaacccctgcagaaaccttggttttggacttctggcttccagaacagtgagacattacatttgtgttgttgtaatgattacagcaaccacaggaaactaaagcaggtagccttttcagactctgcagaggaaaaaaaagcatggccaaagttacccaagaaagagttgatgaccccaccagtccccagtcacagcagtcttagctttgttcccagaattagctgacctcctccaccccatttccttattcctttttaatgctccacaaaacccaaggacagtcgagacctggtcctgcgtggctgcctgatcaccagaccgtcaaaagctgccggctccttcatgctcccaaacgtgactattttatttactcttaacttcatcttgtttggaaattatttaaagcagtttcaatggagtcaaactgagtcatattttaactgcttaagtaccacttaaaaacagactttatgagttcactcggattaagaaacaaaaaaggaaataaaagaaaaatgaaataaaataaaaaagaataaaaacagatgtcaacaagtcctttggcaaatgatcccacaatggcttcattttctgagcttagatggcgctagatgaggttaatttcaaacgaggtatactagtactagattcgaatggacagaaactctgaaggttctgggatcgttttccttttagaaagttttcaggattcaaagataaagattcagggcagtggttctcaactttgactcacactagaatcatttggggagcttaaaaagaacagccacattccagactctccccagatcaggtaagtcagaatcttggcgggtaaagcccaccctggggctccatggaacccctgagccagaccctgcacccagcttcgcactgacctccacatgctgcagggtgtagtgtggtcatgtgcccagggctggccaatcagatgtgctcaccctgagctcagctgtgaaggggcaggtaccatccgggatccattctgccaggcatgataacaggcagtgccagtgtggacagtggtgggataagctgtgggctggcaccccatcgtacagatgaggacacagctcagagggatccagagacttgtccaaagtcccataactaaggactggcagagctgggatttgaaccagcccctctggctgcaacgcctgccaccttttcctcccttgaaacagctccatgccttaattaggggcagtgttggccaggcgcggtggctcatgcctgtaatcccagcactttgagaggccgaagcgggcggatcacctgaggtcaggagttcgagaccagcctggccaacatggtgaaaccctgtctctaccaaaaatacaaaaattagctgggtgtgatggcaggagcctgtaatcccagctactcaggaagctgaggcaggagaattgcttgaacctgggaggtggaaggtgcggtgagcagagatggtgccactgcactctagcctcggtcacaagagcaaaactccatctcaaaaaaaaaaaaaaaaaaaaattaggggcagtgttctggactctggctttcaggcctagctctctgattctcccagcacatccatgagcaaccaaacatgccttctgctttttttcaaagttaattttgttattgaagtatcagatacatacagaaaagatcacagatcctaagtgtgcagttcaatgaagtttgacaaagcaaacacactcatgtaatcagaacccagaccaagaaatagaacagggccagcaccttagagactctcccagggtctctcctcccaaacataaccaccaccagatttctagattggttctgcttgtttttgagctttatagaaacagcatgatatagtgcacacccttttcgtgtctggcttctttgagttagcgtgggtgagagtcatccatgctgctgtacgtagctgaggtttctccatcctccgtgctgtctggtgtgaagggccgtaaccagcttacctgttctattgtgaatggacatttgatgtttgaatggtgctgctaggaatattctattcttatgcctgtcttttggcaccagtgtgtacccaataccctcttaagaaatgcttctgctaaagtgagcagagttggtctatgttgtttacagctaagcaccttggttgatgccatttataagcactactattgtccccactttacagaggaggaaactgaggttcagagagaggttcagccacaggccaggcacagctgcggccttagttacaaggccatgtcactaaagagtagcagagctgggatttgatcagagctgtcctcttaaccactagttaagggacacaagtgcatctccgccccttagacctgcctgatgccgcacagcggtttaacagataatacccacccccttgatggaaatggctggggcgggggactgagagctgcactgatggtgctgtcctgggcagggcttgggatgtcgccagcatgcaggagccctgagaggaggatcagtcccttccaagagggatatgagggagggggaagcctcctgggctgccactgctcctggcagcagcccttccagagggaggctcctccctgagggcaggggagcttcctttcggaggagagggcaggctccttcgctgggcagagcggtggtctgggcattgctgaagcggccagtggagacagggatcccagccttgagattcaccctctgcctcccatgggaatcctaagtaagaaaatgatgcttctgactgactgtctggcagcccctggtgaagagctgtccctacccactcacctctgcaaatagcagaatggcatatggtggcagaaggaagggtccagaaggtagttcttctgcggaatgacccatgcgatgggctgctctgtgacgcattggagtggggatcatttccttgcagtggaggagtgggtcagaggccgggcttgtcacatggaagtccctcctggggatgggccactgacagatccctctgtaaacagcatttgcatcagattcactgctccagaaagtggggatcagggtccctgaagccaaggagcaggcatagaagaggccagaggtgactggcagcatatttgacaggatgcataaatcttgttaaatgggagagaagccaaacacgctggctttgtatgggcaatttagaccttcctaggtcattccctgcagggactgcaggcctcagtgtagtctctgatctgcagcagctgcaacagcatctaggaacttgttagacttactggttttcaggttgctacttaatcggaagttcttcaggtggggcccagcattctgtgttttaacatgccaaggggattctgacgcatgctgaagtttgaaagccaccagcatagtgcaatatgaagtaggcattatcatcaatcccatctcacagctgagggaacagaaggtctgagccagttttaccccaagttacacaattaataggaaagacaacaaaattaggtgcagctgtgaataacaaaaatcgaactccagagcaccatgaactaaacaaaattgtttatttttccttcatggtccaagatagctgctgaagctccagccgttgtgtccatattctaggcagcaaaaaggagggaaagggccaggcgcagtagctcacgcctgtaatcccaacactttgggaggacgaggcaggtggatcacttgaggtcaggagttcgagaccagcctggccaacacggtgaaaccccatctccacaaaaaatgcaaaattagccaggcatgatggcgtgcacctgtaatcccagctactcaggaggctgaggcaggagaattgcttgaacgggaggttgcagtgttgcagtgagccaagatcgcgccactgcattccagcctgggtgacagagcgagactccgtctcaaaaaaaaaaaaaaaaaaaaaaaaaaaccactgtgctccagcctgggtgacagagtgacactttgcactttgtctcaaaacaaaaacaaacaaacaaaacaagtaaagggaggaaggtcccaccctgtccctgtaggggacacttcctaaaattgtatatacggcttcagcttacatctcattggctgcaatttagtcaattgcttcacctagcagaaagagaggctgggagaataaagtctgggtcctaagtgactatgcatgcaggtaaaacttggggttctgctgctatagaagagcctcgataatggggaacaactaggcagtctctgccgcaagagtgtatctgagaatcaacccagggcttctaatttcaccatctgaagttatgtttttgtttaaatgttgtctttatcttccccttttagaagtcccaccaaaagcaagccttcttggaagtcttctccgttgctgctgtctccccaatgcctagaacgatgcctggcttgtagtggtgatctttgcttgctattgaatatactactttaaaaattaaattaaatacctcatgtgagagaagctttttcagggtctggcacatggaaggtactcagaatgtggttgctgctatgtatttaaagcagtgcttcccaacaaagccccgctggcccctggcaaggtttacctcttagactctcaatcccaccaccaccgcctgcctgcatgtacagacttgcacacaaatcttggccctttcattggactttaagaataatcagtgctggtcaggcgcagtggctcactcctttaatctcagcactctggaaggctgaggtgggcggatcacttgaggtcaggagtttgagaccagcctgggcaacatggtgaaaccccatctccaccaaaaaaaaaaaaaaaattagccaagtgtggtggtgcatgcctgtagtccccaactacttaggaggctgaggcaagtgaattacttgaacctgggaggcagaggttgcagtgagccaagtttgagccactgcactccagcctggtcaacagagcaagactctgtctcaaaaaaaaaaaaaaaaaaaaaaaaaatcagtgctgtttgattgggtctggagaatgcaagccacagcccaagtaagcaactagattgggagagaaaattcatctcgccatttcttgtacaagcctggaagtaggccttaagaacaaagctgggctcaggctgccgtgatggggtgtctgtctattctggcgtttgtcatttgagcttttccttcgtaggtgcagccttcttgggttccagggacttggtgcccttacttacagcccattgggtgcctgccccttgtcgccagtgttcaggtttgtggtcacccctatgttgcctaactgggtcaggctggatggagccgggagggctgtttgcgttggctgcttttccctgtcaactgtcacacacgaatgcagcctccaaaattcaatttaacataaatcttgccatttggaccaaggcaagtgggccttattcaaatccgaacagtctattattgagctcggaaacagacaatagctgatgctgtgatgttcagttgcaactgccctaattacagacaaacactaatttcataggattttttagagtgaagcaaatcttttgaaagaagtgtcctcatttaaaaactacagatcgagagggctatgagggttcattttatttattgataatgtggactgcgtcaattcctgaatctcatttgttcaaactcccagggctgttgtgaggagcaaaatgaaaatgaggtaatgtttgtggaggtccctaatgaagagcaaagcaatccaacagctatagtagtattgtgcgttcaacgccctgcaccttgcagctgcgtcccattaacaatgacctctgagctgtgagctccagggcctctcccctcactccgcgggccactctccatgggtccctcacctccagcttcctctttccttgaatgtggcttctcaacatttgggccatgactcaaatgtcacctcgttgaggaaaaggtgtccaatcagtacttactgtggtgctccgccctgtgtctttccgagttcttagtcccatgagataatctgatgcattggttggcttgtttttaatctctcttctccatgggagcaccagctccataagggcagagaccttgtctgtcttgttcacacctgcatctcctgtgtccagaacagtgtcttgcacctagtagagatggatgtatattgattgggagtttggcttggggaggaaaggagaaagtgaactgttaagaaattagggcatttagcattatctaagaaactgaagcagtacctggggtccctgagtacctcgaacaggtgtgtggtgtggtacctggagtccccagggcccctaagtacctggagcaagtgtgtggagtggtacccagagtccctggaatctctaagtacctggagcaagtacatggagaggtacctggagtcccagaatccctaagtacctggagtaggtgggtggagcagtacccagactccctggaatccctaagtacctggagcagatgtgtggagtggtatctggagcaggtgtgtggcatggtacctggagtccctggaatcactaagtacctggagcaggtgtgtggcatggtacctggagttccctggaatctctaagtaccttaagcaggtgtgtggcatgttacctggagtccctggaatccctaagtacctggagcaggtgtgtggagtggtatctggagcaggtgtgtggcatggtacctggagtccctggaatcactaagtacctggagcaggtgtgtggcatggtacctggagttccctggaatctctaagtacctgagcaggtgtgtggcatgttacctggagtccctggaatccctaagtacctggagcaggtgtgtggcgtggtacctgaagcaggtgtgtggagtggtacctggagcaggtgtgtggcatggtacctggagttcctggaatctctaagtacctggagcaggtgtgtagagtggtacctggagtcccaggatccctaagtacctggagcaggtgttatgtgagagattttgatacccaagaagcttacagattaatatagtaatttgcagtattcaaataagtgccactaatgtgtgaggtggcacgtggtaggagcagatggttataaatacagtaggggctgcaggggacacacagttgtggacactggagctattcttcttggagaagggcatggagttgcacctcagtcagcagtctcctctgtcacctctggcattttgcacctggccttccatggctgctgcctgtcgctgttggctctgggcccttcctttgagcagctgttccacagtggaggccctggtgctgcctccactcagtcacacactgtgtgtggccacagctggccagggtccaggctggacacagcaccaaccaagtgctctgtgaggtccgtcctgcaagaccagagccgtcagtgggcaggaggaggccatgcagaggtggcactggtactgcgctttcatttcagtttaggatcctctttgacatcttttctttttgagatggaattttgctgttattgcccaggctggagtgcaatggcgcaatctcagctcaccacaacctctgcctcccgggttcaagcgattctcctgccttagcctcccaagtagctgggattacaggcatgtgctaccacgcccagctaattttgtatttttactagagaaggggtttctccatgttggtcaggctggtctcaaactcccaacctcagatgatctgcccacctcggcctcccaaagtgttgggattacaggcgtgagccaccgcgcccagctactcttgacattttttgaaagaatgttctctatctcattctcacccatatatcccttatgagagaagccaggaaaccagttctgaggatgtcagtctggctagtaaaaccctgaggattccattttcaagggtaccttgactgttgtgttcaaagaaagctttgaacaacaaatgtaaaaaccctgccaagccaagtccaccgagtagctcattaaaatgtatttaggttgaggcttatttttttaagcttactttatcagaaaaaaagaaattggatttagatactaaggaaggcttcttgcacagagagggacgtccgttgtcttagttctatgatctcgatgcttagacaggccgctcaccccagcagggcagagttgttcttatgtcccaggggggtcgctgcagaagctctagcaactctctccctcctttcatcacctcgggccttcctcgccagcacctccattcctaaggctcacgtgggagagacagtgtggagagaaacagagacgagaacaggacttcttaaacagcaccagcaagaatagtcttacaatgaagtgtgcaccacgggagcgccgcaccagccggcatggaggagcgtggcaatttcaagctgacccctggctgcagtggcctgggtctgtgtggcgttcgcggctttggcgactgcggtggagctccctcgtgggtccccgaggacgcctggatgggcacccaccttaaatatttagaaatgatgaaattaggctgggtgtggtggctcacacctgtaatcccaggaggctgaggcgggaggctgggaggctgaggcgggtggatcacgaggtcaggagtttgagaccagcctgaacaacatggtgaaacctcgtctctactaaaaatacaaaaattagctgggcgtggtggcggatgcctataatcccagctactcaggaggctgaggcaggagaatcgcttgaacccaggaggcagaggttgcagtgagctgagatcgcaccactgcactgcagcctgggcgacagagtgagactccatctcaaaaaaaaaagaaatgatggaactagacacagaagatgccacccatgtttatatagcattcttggtttatctggacctcatagaaagcaaaactggcatgaactaaactgtgtcagattaccagaactccagctcatctgccttgttggtactgagatagaagaggaggggttacagactgtggtgcctacccccatcactgcttccctcagccataacaggataagggagatcttgaaggcatcttgaaaattgccaggtgatccagatttgctgatgtcttttactctggccataatggagtctgattctacaatagtctattataaacttactgatggatttatgctgccagaccctcagaatatttctcttagaagatgacatctatgtttcctgatgcttgttttattcatacaagattggatttgagacccgtcagactgctttgtcttttatctcagagatagtcagggttgacttagatagtgagggttgacttccctattccataaggttttcattctgaagaataaaacttccccagggggggctgggcgcagtggctcatgcctgtaatccaaacactttgggaggctgaggcaggtggatcacgaggtcaggagttcgagaccagcctgaccaacgtggtgaaatcccgtctctactaaaaataccaaaaaattagctgggtgtggtggcgcgcacctgtaatcccagctactcaggaggctgaggcaggagaatcgcttgaaccccggaggtggaggttgcagtgagccaagatcatgccactgcactccagtgtgggtgacagagcgagactccagaaaaaaaaaaaaaacaaaaaaaaaaacctctccaggtagaagactttttctttcttaaaaaatataggtggtttctttacaactttcttatctagagacagtttaattacagttgtatacaggtttacgcctaggatgtgttcagacaggtggaacctgtgtgctgcttttgtcatcccacacttatagcactcatagttgcctctgtttattgctcccactgctagctcattgttgagactgccatctctttctcttactcaactctcccagtgccttttggccactgcagctaccttggaatggcattttatacataccttgtcacctacttctgctttttcctacccagtagaaggtaaaagatttctttcaattggtcctcctgttgcaatgactgttatttctcttttttggttaactttaaatcaaaactcaaaatatgttcatccagagtgtaaacttacatgtcctgagtaacagggataggagacatgctacccacaagagttctgggccttccttttcattcttattaccaccatccttattatatcatagcttgaatattacaagagagatagtgtgggacagtatcagtttttaaaatgtcttcattaattagacccagttattccacttttgttaatgtctctcaaattgtacaaggtatgaaaaattatatgcacaaagatgttgcgagtgacgttacttttagtagcccaaattataaaccacttaaaagtttggggtaaatatcggcaaactttttctataaagggccagaaagtaaatattttaagtgttttcttttttctttttggagacagagtctcgctctgttgcccaggctggaatgcagtggcatgatctcggctcactgcaaactccacctcctgggttcaagtgattctcctgcctcagcctcccgagtagctgggactacaggcgcctgccaccatgcgaggctaatttttgtatttgtagaaacagggtttcaccatattggcaggctggtctcgaactcctgaccttgtgatccgcctgccttggcctcccaaagtgctgggattacaggcatgagccaccacgcccagccctattttaggttttgaaacctactgtctctgtcataacttgtcaacactgctgtatgaagcataaaatcagccacacacaatacataaacaacatgggcacggctttgttccagtaaaactttatttacaaatgtgttgccatagtttgccatccctgggtctaggaaatagtcgataaacaggtatatacaaacgatacataatgtacttattaaaaattagggccaagcacggtggctcatgcctgtaatcccagcactttgggagcccaaggtgagcagaccacgaggtcaagagattgagaccatctggctaacatgatgaaaccccatctctactaaaaacacaaaaattagctgggcatggtgatgtgcgcctgtagtcccagctactagggaggctgaggcaggagaatcacttgaaccctggaggcagaggttgcagtgagcggagatcacgtcactgcactccagcctggggacagaacaagacttggtctcagaaaaataaaataaaataaaataaataatgaatattattaaaaacatgagaattttacattaagtaaaatttgcaagatgcaaaagtgtatgagtgggtgtaatcatggctgaaataacacatcaagcatttgataacaagatgacaaagtaaatcaaattactaactgtggttacagtgggatgggaggcagtaaatggatgactttgtcttttctcaatgtttatttttatttgtattacttttataataaaaatgttttaaaatttaaaaaaagaatgaagtgagggtgtctaaggtgtaggagcactctgtcccaagaaggggagctttgccggcctgccattttgcccagactttcttccctccccttcatcaccctctggaggcctgggatgctccagcaaccgaacctatcccctctccatgaggctgtctctcagtaggaggagaggcggtgtcaggagtcacagcccggctttggtggccttttatccctggcagtaccaccatttacatagctgtgtgcatggtccaatcatgctgtgcctctcttccctcttccataaattatggagttatcaatgaggctggaaatgagcaatgaggactgaacagtgaattcatgtctggctttgggaatatgccaggcagaaggcatcactcagtattgttggctgttgtgtgactgtcatcattgctgccaccaccatcaccatcatgagcatcgccatcaccaccatcatcaccatcaccaccatcaccatcatgaccatcgccatcaccaccatcatcaccattaccaccatcaccatcaccatcattaccatcaccaccatcaccatcatcaccatcaccatcaccatcatcaccaccatcatcatcatcaccatcaccaccatcaccatcactgccatcgccatcaccatcaccatcatcactatcaccatcaccatcacatcaccaccatcaccatcatcactatcaccatcgccacatcaccgccatcaccatcatcaccatcactatcaccatcatcactatcaccatcaccatcaccatcatcaccatcatcaccatgatcatcatcaccattgaagacatctccaataagtgctgtttatttatttatttttaaacgcagtagcatttacaactaattgatcacaagcagttacagatctctttgttccttctccacttccactgcttcactcgacttgcctaaaaataaaaaaataaataaacagcacttataattctaccaccgaataactatttttgaatttgaacatttattaccctctcatttactgtcctttttaaagccttggagaaacacagccatagggtcttttagccagaaacctaacccagcttcttcctttgactaatgaagagactgacattcaaagggttatgtgataggattttacgtggagcaagcagaggtgatgcccctcgcaaggtttccccgaggagcctctacctgatcctcaaactcaccagacacagtccaatctcatggagaactttgttcataggcaaaccattctttatccagatgaaattttggtcatttattaaagactgttctattgaacagaaattaaactttgatcagtgaattaagttcattaggaaaatcatgaacaagttaatcactaaaaatagatggaaatttccttaacctctagtttttatcaaaaaccaatagcaaatataaaatttaatagtaaagcattcaccacattcccactgagtccagaacaaaacaagagctatgaagctatcactcacttttattcagtaagtcctaccaatcaaatagaacaaagaaaagaagtaagtgttactaagattaaaaagcaagagacaagcccatcagttgttggtgatgtgattgacttatctagaaaattcaaaagaatcaattaaaaacgcatcagaaaatcagacttcagaaacatttttagaaatacttactgacaataggctgggcgcggtggctcacatctgtaatcccagcactttgggaggccaaggcaggcagatcatgaagtcaggagatcgagaccatcctagctaacacagtgaaaccccgtccctactaaaaaatacaaaaaaaattatccaggcgtagtggcaggcgcctgtagtcccagctactcgggaggctgaggcaggagaatggcatgaacccgggaggcggagcttgcagtgagccgagatcgcgccactgcagtccagcctgggcaacagagcgagactccgggaaaaaaaaaaaaaaaaaagaaagaaatacttactgaaaataaccaattttaaaaggccatagagccaggtgtggtggcacgtgcctgtaatcccagctacttgagaggctagggtgggaggataactggagctcaggagttcgaggctgccatgaaatatgattgcaacactgctctccagcctgggccacagagtgagactccaactcctaaaataaaaaaacggtacagaaaaaaatgataaagtgatgaaatgtccctcatagacacctggacactctctggttctaatgtgtttgtcttgagtgctgagctgctcgcctttctcagcctggcagggcccgcaggagcatgggaagcatcccctgaagaatgagtgagtgagtgacacccggctttggcacctgtgctttctggcatctggatgtctgttgtgttgtccctcagcagcttccaggcctctccccctttctcctgcaccacctccctccaaataaggaacgctgcaagagcctcctcacccccttggaaagtggactgtgaagaaatgctgagaccagctagaccctctcaggaccacaataaccgcagaggtgtgctggcgctgtccttcccaccgaggcaactctaaatgccccaaggcaaagtccgtgttgtcaaagggaagtgcaaggctatcagtaaccaccccagggacaccctcagccccagatggcctcttgcactgtgggggagcaacacagaggaacgtgccccaggacctgtactcagaagccgacctctttgtgactgtaaagaacaggagggaatgaggcgggtcttccgttacctgctcctgctgcccttaagattccctttcgggaaaccctgtacagaattagggaagaaccatcttggggaggaatgatttctaagacacctgctccagccattattgctggcaacaaaccaccataaaactgagctgtgtcaaacgatccttttatgatgctcctgggctctgtgggtctggcagggagacaggcacaagggattggtctgtcagccccaccatggctggggcccagctggggagccttggcagccaggggtgactcgctctggcctcgactcacacgtgtggcacctgggacctcagctgggcagttggctggaacccacaaatggggcctctccacatggtttcctgcgaaagttggtctgggcctccttacagcatggctgccaggctccaagagagagtgttcacccggttccaagagagcccggtggaagaagctgtatcaccttttttaaaaaaaatttattgtggttaaaaaaactcatagtgattgggtgtggtggctcatgcttgtaatcccagcactttgggaggccgagaggggcagatcacctgaggtcaggagtttgagaccatcctggccaacagggggaagccccgtctctactaaaaatgcaaaaattagccgggcgtggtggtgtgtgcctgtaatcccagctactggggaggctgaggcaggagaatcgcttgaacctgggaggcggaggttgcagtgagcccagattgagccactgcaatccagcctgggcaacagagtgaggctctatctcaaaacaaacaaacaaacaaacaaacaaacaccacatagcataaatttctcctattccatagattgccgtagactgggcatatatgcattcatcagtggctgcagctgaactggcgtgggtgagatggatcccatactgttgagcccaagcatagcatccctacttatcaggatgatcattctaatcactggccactgtcatctctgaggaggtggaggtgagagtccggctgcatccacaggacaagccgtcctgtctgcttgctgctccatgcctccctgcagaggacattctgcggggcattatgtaagacacgaagatccacacatgtgtacccactccatagatccagctccatgcctcttccccagagttccttgtctgtggccttccagggttactccctcaggtgggttcataaaggagttcggcaggtaaaatactggacagccagtcgctccctcaagtaggtttgccagataaaacctgggacactagtaaaatctgaatttcagataagcaataatttttttttaagtataagtgtgtctcatacactatttgggacatatttatactaaaaaatcatttgtttattggaaaatttaactgggtgtcctataattttatttgctaaatctgggacccctacactcaaggcccctatcagccaggcaagccagatgccactgctccggaatccatgcttatccacatctcaggacacgccctccacagtgagatgatagccaggcttagtgctcccaactgtacccgccagaaggacttcccttgaccactgtccttccaggccactgctgaatggggctgtagtgagcagcagtccattttcagccagcatcaacagagtgcacagctgtgaactagcccagctggtcataaagagctccctgtccctaccatgaggccatagatgtgtgttaggggagaggtattggtgcaacggagctgtacgacatcggattctgggtcacctattcatgaatctactgaagctctctgagttgctttgaggttggtctgtctgcccaccatggggcagtcccaaacccaaatgtaccatttcccaaatatttgattaactgttctacactcacctgaacttaatacccagctcatgaaggtcatctttggccacagagtcacttaacgccccatggccaggtgcttagtctctacctgggtccagtaaaacatcagaagtagttatctgctagagatgctggtcctcctgtctttgggctctgtcgcaactctcctatttgcactttccagatatccacacagcatccttgtgtgccacgctgtctctaaaactctcagatcagggttctataaccagagtggtaacagttgcttccatcgcagtctagttttactgtaggctgtgttcttgctctgggctccacttgaaactagtagtttttcagttaacccctaaatgaattagaacggtattctcaagtgcacgggaatagatgttgcctccaaaagttagcgtcctgccaagcttctttcttagtggtcagggctacgacgtgaaaccagttctcccttgcccataataaatctctctctgtctctctgtctctctctctcttcctcccacccttggtttgccagctagacctgattttcacacttcaaaacttagagttttatctggtaaccctggtaacaaacttcttggagaatgatttgggaattctgatgacttgctttttaattccagaaactaaaacccaactctgtccttgggtataatttctaatcttccctttctcatgtgtggtcctgtgtttggacggtaaactcatctggtgggaactgtacttacatttctgttttatatgatgatgagggtgtgacgagacacccattaaggtccttctcaagtcttcagggacctgccgagcctatgatgggtgacttgggctttgctgcttgccaacaggggcttcataatggtgcccatccaggaaagtaaacacacatgtaatgaggagagggctatacacatgtaatcaggagggctatatcccctccctgtgtcttcttgaggtaaatactgcattgcctaccagttgttgtttagactttgatgaagcaacggtagagaaaagagtatgaaggcaaagattggtctgttcaatactcattcaaaatgtcagtcatcagactgggtggccagaaggcaagattgtcaagggctggtgccttccttctatgcaggcaccttccccacccaccagcagcatggaacctgctccttggtttgccacccttggtgttctcacccagcaacagtgctgatagagagcacgtttgtatgcatggtcgtatatgtaggtacatttaacttttaagatctaataccatttcctttggcaggcaggaacaataggatattaataaatattaatgaagtaattatttattaataataaataattctccctttaaaaaattccagggatgtcttgagattccaggacagctcaacaaatatgaatcccagaggaagtaacaattgcttcatttcaataaaaatggtccccaaaagctacctgtcatctctatgattcttgaaattctgccaaatcccaacctattattgcccttttacaggaatttgctgggttttttcctttggcttagtttttaatgcattgttttattgataatcatgttgtaaataaatattagcttacatgggaagccattcacagcaaactgttaggagaaaaaaagcagattacaaaacaaaatgaactcaagtttatcttcaaaacacacatatacatttaaaatgtaggagaagataggctgggtgcagtgactcacgcctgtaatctcagcactttgggaggctgaggtgggtggatggcttgaggccaggagttccagatcagcctggccaacatggtgaaacccagtctccactaaaaatacaaaaattagccaggtgtggtggtgcatgcctgtaatcccagctacttgggaggctgaagcaggagaattgcttgaacctgggaggcagaggttgcagtgagctaagagtgcgccactgtcctccagcctgggcaacggagtgagactctgtctcaaaaaaaaaattaaaattaaaaaattagaagtaaataaatgaatattaatggccaaaattgagtctcatggccacctgtagaccagtcactggccaaggagaacgtgatgatcatgactagttccacccagtgatgtttcatcacccagggctggaatggaagctgggtagggcatgagtagggaatggatgatatttgactacaaagtggttttttttctttttttgccagaaatgttcccatggcactacagaccatttaaatccctgtcttccagctgcccctccccactacaagatctccagcagcagcagctaggtgttatcagcaccacgcatggctgattctttgggaataatggcagaatgccggccattaggatgaaggatggatggccacgttgttggcagactaaagggccagatgcagcttcagacacatggagggttctggaaagggagagactttgtaagccgagtttccagaaaagacgttcaggaggcagggaataggaccttgaaggatgcacccctctctctagttttattagttcttctcatagatttatttatccttatgaaataatttccttcacttatatgcattctctctggatttgattaactttttagaggttttgtcatggggggttgaacccatttggatctaaacttgagcttttggaggattttgttttgtcatctgtgtggttttagctccctaaattgagctgtgccaatcctgggatctgttccccctgcatcctgccatctggtgtgatctctgttttcctcagacaataatcctgcaattgtttcctttccaatcccccgactaaggctgttttgagagctgcttttcttccacatttgctctttcttacgcctcttctgcaggaggctgagctggctgggttccttgacgtggcccgcatcattcagaccagactcagtggcatctgcttgtggctgaatggatggagggtgaacaggtgtctcagctgggaaattaatccttggctaacgccagtgagccttgtcactcatgcaacatttcattttacccacaagattaaaaagcttcctgagccaaacaccatttcttatacctttcgtatcctcacagcacctaataacatggcctcacatggagcaggggttccataaatatttattagtatcctaatctttcaccactaaggtagtgttaacaccgatgatgagcttgtgagtcaggttgcatatgacaccaaatgagagctgaaatgcaaaaagtgcagaaaaaaaagaaagatgcaacaatatgacttctgtttaccctaacttatctctgattttcttttctgcactgctggctaattgggaaccatgcacatgaacaactctcaagatgtgtgaacaacaaacataagaagaaagaacagaaagcagcctgaggaagtgagcgggaattgctcccttaactctgtttcctgggtgtctcaggagcaccagacctggcctgatactgcacatatgcaccctcccatcccccggacagcactgagatgggaggggcataactcccgttttattgctgagatactcaagtacgaggtggttgaattactcacccaaggtcacggagctggctgttggcagatgtgagcctgttctctgatctgtcccttaggggacacaattcaggccagtgctctctgcagcccaagatggaacaatgagaagctgccctgtggctgattatcatgcctggcttgtggcctcttctcactgttgcccagtgtaactctgcatatttagtccatctccactgattcacactacaagaaaagccaacttccacctaggaaactagtatcttagtccattctggctgctataacaaaataccataaactgggtggcttataaatagcagaaatttattgctcacagttctagatgctgggaagtccaagctcaaggtgccaacacattttgtggcgtctggtgggggcctgcctcccgattcacatgtgatgtctcctcactctgttctcacatggcagaaggggcaacgagctcccttgggcctctttgataagggcactaatcccattcatgagggtgccacccttgtgacctaatcacctcctaaaggcctcacctcctaataccatcacattggggattaggatttcaacatatgaacttttgggggacccaaactttcaaaccataccaactagcttgactctaacatgcagacctggggccaacttggagcacttgccccacagctggcttttctctcacctggcttctagggtgacatctagttagaggcttggtggtcactatagggtcataagcttgtctgccaagaagtttttaatagatgcccctgaacttgccttgcaggaagctcctctgtttcctagcttggggatggctcttcccacactttttctctccctgcagttaaagcaatctctggcaaggccattacataagcagtgtcccttgccagctgtcaccaaggccaccggaaaaatcaagacatatgtaagccagcaatggctcaccagaggctggacagccccgcatgctcattaccccctgcttggagctgggtttgagccctctcatgactgccagccctggatttttccaaaacataaaaaaccacagtgataggcatttgctgcagatttttttcttttctttctttctttctttctttctttttttttttttgagatggagtctcgctctgtctcccagtctggagtgaagtggcgcattctcgactcactgcaaactctgcctcctgggttcaagcaattctcctatctcagcctcccgagtagctgggattacaggcacacggccccacacccagctaatttttgtatttttattaaagatggggtttcgccatgttggccaggctggtcttgaactcctgaccccaagtgatccacccgcctcagcctcccaaagtgctgggattacaggcgtgagccattgtgcccggccaactgcagatttaaaaccaattgagacactggggaggtagaacacaggctagaaacattaccctgaaagccatctgtcccttttggttcctgatttcttcctgaggtcaaggtcatgtacttgttcctatttccacatcccaccttgtattagtccattgtgtgttgctataaaggaacacctgaggctgggtaatttataggaaaagaggtttatttggcttatggttctgcaggctgtacaggaagtatggcatcagcatctgcttctggtgaggcctcaagaaacttccactctggccaggcatggtggttcacgcctgtaatcccagcactttgggaggacgaagcaggcggatcacttgaggtcaggggtccaagaccagcctggccaacatagtgaaatcccgcctctactaaaaatacaaaaattagccgagcatggtggcacacacctatagtcccaactactcgggaggctgaggcacaagaattatttgaacccaggaggcggagtttgcagtgagccgagattgtgccattgtatttcagcctgggcaacagggcgagactctctctcaaaaaaaaagaagcttctgcttgtggcagatggtgaagggagagtgggtgcaccacatgagagagttctccgattctaacggccagctcccatgtgaagtaattgagcaagaactcactcattgctgtgaggagggcaccaagccactcatgagggatccaccccatgacccaaacacttcccaccaggccccatcttcaacactgggggtcacatttcaacatgagagttggagggggaaaatatgcaaatgatatctcccttctcccaccaccagctgcatgactgtgagtgagtcatttggcctccctgggcctctgcatcctcacctgaaaaatgaatgaaaccatcaccagggtccccttcattctggagctcagtttgttctagtgtgggctggcctggagcaccccttcctcccctctgtctatcagatcctgcaagacctgggcatgaagccggtgcccacacctggcgtgtggatggccaggggtatttcctcgcagctcttaggtgagggaccacaccgtttgttggagccagaagtgagtatgtgacccctagattcattctaccaggtattaggtggccacagggcttcccataccaggtccccaaattccaactggtttatttacagagccctttgtctacatcatctcacttgcagcctccccatgaaagcagcaaaatccccagtgtgaggattcctgatctgcagatgagggagatggttgggtgggagggagaagtgactgaggacagcagtgtcatagattacaaccgctgcgtcctccacctgacccacttaaagaagggaaaggaggagggattggggagggttcactctgcatcgcccgcacactgatgccacggctcacccttccaggctagcacctgcattagccaacactactgggaggtagcagagctgccatccaaccctcctggatggctgcactcttcttcagccctccagcccctggtgtgctccgtcccacacagagagagccagcaggaaggagggcagccaggtccctgtaggtgacaagatgagtgagctgtatctaagaactcggcagctcagggttcagaaagagccgaggtgtgagccttcaagagacaggctcaacgtgagtcagtttccccctctggcaggtagggtaatggatatttcagagtttcataagaaggaggcaaatctacgcaaaatgcccagcacaaggtttgtcaataaacaaccgtaatactctctgcgctccctgtgactatcaggctgggaccttgcaagccacaccacactttgaggcagcaaagatcccagcctctttggcattccagttgcataatctttttgttgttgttgttgttgttgtttgagtcagcgtctcgctctgttgcccaggctggagtgaagtggtgccatcatagctcactgcagcctccaactcctgggctcaagcaaccctcttgccttggtccctcaaatagctggggactacaagcaacaccatgcctggctaatttttttagccagagatggagtcccactctgtcacccagggtggagtgcagtggcacagtctcagctcattgcagcctctgctacctgggttcaagcgactctcctgcctggctaatgttttatttacaattttgaaactggagttaagagtcaaagatgtacaataaatctagtaaagtgaaacccaaaacaacttctagaaaaggggaaaagtcgggccaggtgcagtggctcacgcctataatcccagcactttgggaggccgaggtgggtggatcacctgaggtcaggagtttgagaccagcctggccaacatggcgaaaccccatctctactaaaaatacaaaaaaattagctgggcattgtgtcgggtgcttgtaatcccaactattcgggaggctgaggcaggagaatcgcttgaactcaggaggtggaggttgcagtgagccgagactgtgccattgcactctagcctgggcaacaagagtgaaactctgcctcaaaaaaaaaaaaaaaaaaaaaaaaaaagctggggggaagagtgacaaaaacaaaaagatgaccatgagaagaagggcatttttaaaaaaaaaggattaacagaaggggttaagattgaggcttttggggagcagctggtaaacagaaaaagaaattggctaacaaataatttggatgaaaattatgtagtaaagagattggaaaaaatacggcttcagaacaataatgaaccatttttgataaaagctagttcctggaatggattgcctctcatttgtattatatcaaaagctgtttggtaatttaagggcagctggtgaagatctggtgaaagatcacaaacagaaggactaaaagaaaggactcaaggagaacattctctcagtctgaaaaaaatacagtcggatttgtatgctgaaatgcccccaaaacaaatgattctgagaaatgaaaccactaacagaaatgagttgagaaaatgaacgtaatggagtatctcagagttaggagaggacggctgaaaagaataaaaaggagattcaagtggagctcagagagagaagaaagacaatccgcagggtggacccaagcaaagggcttttgtctgaggtttatgcaatgaatcgtggcttcagtgagctgattcctggtatacattgcactacatttggccagaacaatgattgctgccttttttttttttaactcacaaaaatcaaagtattgtgtagctttttccacctgcctgaggctccaggttatgaaaagaaaaggatgaatcataagtaagaatatagctttgatgaaaaagccctctatcatatgatgacatgatcagtttaacaagacccatggtgtctgtctgacggagacatgactatttttggactttacgtagcagaattcttgtatcacaagaatattcatagatatgtgtgatacgggtccactttgagcatctgaaagttcagttctgggtgcagtctggtttttgtatgtgttcttgtagtagcagtttattgcataaggaataattactccagggtttttgaaaaaaaaaaaaattaagtagcagtagtagctaacacatagatgcttactatgtgccaggcactgtttgaagctcttgacatgcattccctcttgtaactgtttcagcagccccattaggtaggtactgtatgattccattttgcagatgaggagacccaggctcagggaggttaaataacttgcccagcgtcatagagccagagaggagcagagcatggagtctatgtgccaaacccccttgcacccacccctctatttggccgttgttcatatttatcctatttacttcaagttatctcatatacaagagataaaacaccacatagaaagttgctgtgcctgttatattcccagtccttgcttcgtcccctgtcccatccatgtgaggtgtatcccccagttcctttttcaaatacatttacataggtgtcatatttatggacaatagagaatgttatttttcatgcttcaacatttgcataagtggtaatatactctatatccattgtagaactcgctttttcctccatttccaccattatgatgtgagtgttgtctatgttgatatgaatccatttctctgcaccatccagttctgtagttgctggccacatttggatgctgagcagtgatatgtgactgctggaattgagatgtacggtgagtgtaaaacacccggtttcaaagacagtaggaaaaacagtaaaatatcctattaataattttcatattgattacttgttgaaattataatattttggacatattgggttaaataaaatgtatcattaaaattagcttcacctatgttttctctctctttttttttttttttttttttgagacagagtctcgctgtatcgcccaggctggagtgcagtggtgtgatcttggctcactgcaacctctgcttcccagcttcaagcaattctcctgcctcagcctcccaagtagctgggactacaggtgtgtgccaccacgcccaactaatttttgtatttttagtagagatggggtttcactatgttggctaggctaacctcaagtgatccacccgccttggcatcccaaagtgctgagattacagacataagccatgacacccgacctgttttcttattttttaatatggctgctagaaaactgaacaccgcctctgcggcttgcatgtttggcttacatttttatcaaagggcagtgatgtggatcattcctcttagctgctgtctgtctgggttttgttaattggtgaagtaagaagtcctaaatctaatagcaagaagaattactatttactgcgcacagatatttactctaagtgctttacaagtaatggcccattcagtcttgcgaggtggcatggctgcacgaagtgagattaagcaattgcccagtcacgaagctccaaggaggctgagttgaggctgaagtcaggcggctgcctccaaagcctgaccttgtaaccactaactggacaaggccccgtgagaaacggcataaatccacctaagaaagcaatgaccttagagcttcccttgtggtggggtgaagtttccttcaccacaatacattgtccttacatatcaatggagcatctgtctttcctgacttttaacagagcaggttataaacagacacacatttgttgtggcaatttcagctttaatgaaaccagcacaggcagtatttttctgacatccgcttgcaacattatgaagtcagctttactctttgccactaattatattaactatttttagggcaaactgtcaatgcaccatactggttcatgcttcctaggttttcaacctgttttctttagccatatctatttatacctcaagtgttttttcttttaagaagcatcctcatttttctgacaatgatatagttgtggctcataattaagttataaaacactctgggagggcaaagatgacgtgtgattgccatggggatattattgatgaatattggattggtttttgaattctgaattcaaacccactttaacattttgaatcataaagttacagaactggtagggatccgaagtctctttagtgttggttaagatcatagacttggcatcagcaactgcgttgacccttaggctgggatcttaaccattgtaagtcttggttttctcatctagaaaatggggatcctgacatccatcttctagacctctgtctgtggattgagacagtgactgtaactctgttccctgtatctacttttactccatggtagttgtggtaattactattattattactattactatatcatctttccccagatgactccaagggtatacagtctcttcaagcacatctggcctttttctcctccatgctcaaccagaactcttgaactttcccttagttggagaggtcaatggttagaaggaagaaaactccgcaacccactccctccctttgctctctctctggggcaccgtgggcagctcttgctgcagagagctgtgctgaggccctttactacagaacctgtacagcgcaccctccaacagcacttccatctatggtcctactccccaaggatctgcctccgcacagccctcccaatgtgcctgaaaatatcagcattgatcctttccctggccaccttgctcttaaggctcctgttcatcatgctatgtggatgtggacctcctcgcctctctgtactgcccatgatggtggattacagcagaatgggctcaccagttgacagctttccccactcatgtcttctactcactagctaagcttggggtgggtgtccccattgcccggaaaattactacacagccctcatatcaaacttgttttgagaagcataaccataaacccatctttggcctatgatcctagggagtcctcatgccaacaagaccttttggggtcagccacgcatgtgaagttagaatgcagtttaggctgtgccatgaatctgaactaaatatgattttaggggtgaggaaactgggacctaggggcttggggaactggcccgaaggtatggagagtacctgaccttgtcgttcttccaggatatgatatttactcctggcaccaatcccctctaccttgtactgaaagcaaggacagcctgcctgcaaccacacatacaggtggccatccagcaggtgcatactaaatgtgtgttgagttgaattattagactctttctaagcaaccttgcagcattgaagggaccgcaatccctttgcctctgcgtccttagggctaaactcgaggtctcgatgtcttgcactgtgggctgggccgggtttggtgcctcacccagcaggtaagtgctgtctacgcctcccacaggtccagtggctcctctccagacttgggtgcactgggccaggctgcaccttactaatctcaaggcttcctgtgtttgtggctttggggccctcttcatcgtgtgaataggaataagaagattgttatttctggccgggtgcagtggctcacgcctgtaatcccagcactttgggaggccgagacgggcggatcacctgaggtggggagttcgagaccagcctgatcaacatggagaaaccccgtctctactaaaaatataaaattagccgggcgtggtggtgcatgcctgtaatcccagctactagggaggctgaggcaggagaatcgcttgaacccgggaggcggaggttgcggtgagccgagatcgcgccactgcactccagcctgggcaacaagagcgaaattccgtctcaaaaaaaaaaaaaagattgttatttctgaaataaacccctatttctcactatttaataatttagcaatcttgactcacaatccaaatccaggcaccccagacccacccacggcccgttgcctagcaacagcctccccacccccgcctccgcgccttttcccgccgactgcccagtgcgcacgctcagagccttcctccacaccccgcccctgcagggcgcgcggtggtgacgtgtagagtgcgcgacgcttttggcgacccgacctctggctaacctacccccggagccatggcctctgctggggtggcagccgggcgacaggcggaggatgtattgccgccaacgtccgaccagccgctgcctgacaccaagccgctgccgcctcctcagccgccgccggtccctgcgcctcaaccgcagcagtcgccggcgccacggcctcagtcacctgcccgcgcgagggaggaagagaactactcctttttacctttggttcacaacatcatcaaatggtaagaacctaggagaggaccaggccccatactccctccagcttctcctctcagccgtttcagagctgcaagaggccttggcgctctggggcacgcccccgtttcacagatggggaaactcagacccagagcgggaagaggcctttcccaagaccacagagacattccatgagttaagcaaacgatttgagcctcgagaggtgcgatatccttaagaatgaagccagcttagagactaaatgcagactcttgtccagcggctcaaatgttcatcccagcgatcttgagcaaattaaatctctttaagcctcagttttctcacctttaatgttggtaatactcactttagttccttagttcagcaaactcaacagataagcatcatcttccctgtgccaagtgctacgggatggacgcagtaaaaggggccaacttttcacccccaaaggtttagatagaaggaaaaaaagacatgattgggaataacccacaattcaaaaagattgagacgggagtggtggcgatgggaaacattagactaagcagaaacacagaagttgcctcagatgattagacccacttgtactgactttgttctaacagtaccaaaggaaataattgttgtcatccttttggccagccttcagggtagcctgagttttcaaagtgactctgtagaggaaaaaccaaaaacaaaaacacaaaagtctcactgatccttatgtttgcctaaattattattttttttgagagagggtctcgctctgtcacccagactggagtacagtggcgtgatctcggctcactgcagcctcaacctcctggcctcaagccatcctcccacctcatcctcccaagtaaccggaaccacaggcatgagccatggcacccagcgaatttttgtattttttgtagagatggagtttcaccatgttgcccaggctgtaaattattttcattatgttacttcactgtatatccacgtgatactaggtgtaaacccctaggcttgtaactcttactcaaccattaaagaccaaaacaaagtaaattaaaagaaaattacgattccagtaacattcaggtgaacatgaatgtgctcttcactgttttactgaaatggaattgttacaacgtgaaggtcttgactgttagtggcccacccacttttgagtttaagcaaattagattcacttgctgtgggatgacctgatgctcttctgccacttttcaaataactacaaaggctttgttctcacattagaccctggcttcatttggtttcacttggtgtttaaatactgtttataggggccaggcatggtgtctcatgcctgtaatcccagcactttgggaggccaaggcgggcggatcacgaggtcagagtttgagaccagcctcgtcgacatggcaaaaccccatctctactaaaaacacaaaaattagccgggtgtggtggcggctgcctgtaatcccagctactcaggaggctgaggcaggagaatcacttgaacccgggaggtggaggttgcagtgagccgagatcatgccattgcactccagcctgggcaacaagagcaagactctgcctcaaaaaaaaaaaaaaagtaatgcttataggataaggcagcctattcagttttcgtgagcctgtgataatgatcatagacagaaatacatatggagcccctgtaatcctagggcagtgctggattataaagggtttattctgattaaccctagtttactggttttaagaaaaatgtggaaaaatgaaaacacaaaatgtacacattcacaaggacagctcttgaactccccaagagtatattcttgagccctggtagagcagctgggttgggttggccttaaaagatgtagtagtaagttatactagagagaacaggctttgaagttagacagccctgtgttcaaatctgtgtactgacattttcttgccttctaatcttgatataaatgcctaacctttctaggccataatcttcttatctctaatatgtccatagtggacctcaaaagagaggttcagattatgtcatagctctataatgtgctgactgggtgaccttggcaagtagcttagcttctctgagcctgtttttctcttgtgaaatgggaatgcttatgtcataggattgttgggagatgtactcaggagtgtacctgtgaaacatagtgggttgatcacatgtgcttgtctctgttccatctaaaaggacagagaagggagtttaaaaaaaaaaaaaagcataaaaccttcagacatggtggttcatgcctgtaatcccaacactttaggaggctgaggcgagccggtcgcttgagcctgggagttcaagaccagcctgggcaacatggcaaaaccccgtccctacaaaaaatacaaaaaaaattagccaggcatggtggtgtgtgcctgcagtcctggctacttgggaggctgaagtgggaggatcacttgaacccagatcatgccactgcattctagcatgggtgacagaatgagaccctgtgtcaaaaataaaaagcataaaaccaaaaagaataggacaggagatgattgccacaaagtggatgaccagggctaattcatctaccaactcctaagcacctggtttgttaaccatggcctatccccagatctcaggaactctagtgcaaggaccccctggaaataggggtgaaggtgggtctaagaacaggaagattacttggaagtctgtttaagaagcaggtccccacagtcctgtcccacctcccatcccctccaagcggccgggtgactacccttcttccaacttggcagatggttaaaaggttactctcccgagatttattcttaggaaggaataagccagagagtaccttgactgtgggacaccaggcacactgcaggggtaggtagggggagccatactgaaaagagggattaagagaaagttcacagtctgaagagagacaccacccgagccttcccccacctggcttctagattggcagccaaagagagtggaagtgccctctctatggtgcgtgaccaattaagagaaaagacattggaaaaaaaaaaagcctagtcaattaattctgagaaaatgaacaagcatcactcatttgcagagcttccactaagccttttagtgttttattcttaaatatatgagtggatggccaaggtcactaagcataggaagaaaccccctggtaagaaagacacgggtcaggcgcggtgcctcatgtctgtctgcaagcccagcacctgggcaggctgagatgggaggatagcttgaacccagggagctgaggctacggtgagccatgatcgcactgctacacttcagcctgggtgacatagactctgtctcaaagaagaaagaaagaaagagaggagacagagagagagaggaaaaaagagaaagacaagacagaagagcagaaaaagccacgtggaggaaacagtagccacaaaggaatggagtggttctgcagctgtaaacatgagaagaggctaggatccaacctgcaaaccttcagtataggcgtgtctttgagtttataggcaaatgagggaggaataagggcagaggaggaagggagaggagacctcgtgaagcctgggggagtcagaaggcttggtaagagtgatgccaacaatgagtcttcaattaggaaagggaggcaggaggaatgttggtataggaaaaacatgtaaggacacgaagccaagaaatagcatctactcatgggagtcagcttctagcttggtggtgttgagcatacatccaaggcaggaagaggtggctggggaggagggaagagccaggaaacagagtgcaggtgtcttctgagggatggggagctagtgaaactgtcaggctggaagccagtcaagacacagtactggcgggtggagatgagggctgggaccatgtccggtccacccaggtggcgctctctggccctgggtcccttcctttcctataacttccccaatgatccttttattctttgtttacttcttgcacaggggtgagtaaggaggtaaaatctgaagtagtgaatttagcctttcttgttctcataaagaattcagagtttttgaaaaattatttaataaaagtaacaactgcaagtttagaagtacagagaaacgtaaaatggaaaatgtgttccttcccccaagtcccctcacctgtagtaactgctgttaatactttcctaagttccttctgggaattacatatgaatgtcatttcaaaaatttatacaaattgagatcacgtcgtacttgacttttttcactgattagtctcttttggccacctttccatactgcacataaagatctacctcattaaggcagctgcagaaaattgcatcttgtggatgcagcataactgatggaactggttttctgttgatggtcttctagctgtttttcttattcttgctattaccagcacagtgctggggttagcatctttgtgtaggagtaagtttatgatcagataaatcccagcagtagaattgctggggcatagggtacaaacattttttatagtgatagttatgctaaatttagagcactacgtctttttagctaactcttttccaaaattcagtccttgtagactagactgcttcagttaacctaaaatggcctataaatctgccacccagaaagcattaaacaaaaattaaagttgtagacggattctacaagtacccatggatatgaaatggaaacagggcctctcccttcactcctcccagctcccttgcaaagctgtgtaatattccactttatgaacgtgctgtcgtttatgtaaacagtttcttgctcaaggacaccgtcattgtttctgcattttgctgttggaatcagcactgcagcaagcatctttgcccatgctatcttggtgaactcttggtagtctctgtgggggtaaatttctagcaatgggatatgtgaatctgtttgggtcactatgagcaaagaatgccctgatctatgcttccaccaacagtttttgtgtctttccccatcacctgccatcaccattaaacttttaactttggcaaatctcataggtcagaaatgatatattgatctttcattaagttaggtaaagcatcccttcataggcgattttatatgtcacttttatttttccctataaactgtccatttctctgttagatttttttatgtacagaaaggaaataatgtgtgtcaaatgtactgtaaatacttcctccaggttgttgcttttcttttgactttgttcatagtcatggtttttctatttgtttttcattcagatgcatataatttcatgtagtcagatttgttaggcctttcccttatggcttctgagttttggtcctacttagaaaggctttcccactctaaaattataggtattgatctcttttttctagaactttcatggttccattttttacttgtaattctttgaggctcctggaatttattttggtgggaagaataagggggcctcggttagccacatcttcccactgctgtttttgaatatttgttattttccctgcttgcagtgccacctttaccatgcactgaattcccacatgttttctgatctacttatggacattctctccttctccagcaccaaactattttagttcttaaatcttcatggtacatttaattatcttttaaggttaatttttcacccttcctctttcttgtcagtatttccctggcccttcctttcccgtggagttttctagcagcctgcctgatgctagatcatgatgcttttgttaatggaacatttcgtctttaatctgcttctttacttccaagcctgttgatactactcattggccaggtcgttgagcctcgcttttgagtattataatcagcatttaattagtctctttgcctttatgcttattttatcttgtgaatgttatttggctaatttttctttgttctccattcttctcaaattgagcccaaacttaggcctttactcagggatctctgcagaccattttcagattgtctgcctgaataacccaacacaaagcccacagagggtcctcttgctgcaggtgctgttgggtgggcggagtcctccaggctggcagaccctccagcccctccactagaagtgcccacagaaatgctgcacagagccctgtgaaccagagcctctcctgtacccccagggacccacctggttctgggagtgctctggctgggacagccctgcttggagttggaacccatagcactttcatctcttctagtgtctttcccgcagttgaatgaaaaattaaactacacatttatgttatttttaaagaatgaggaaagggaggctgggcacggtggctcacacctgtaatcccagcactttgggaggccgaggcgggtggatcacgaggtcaggagatcgagaccatcctggccaacacggtgaaaccctgtctctgctaaaaatacaaaaattagctggatgtggtggtgcacgcctgtaatcccagctactagggaggctgaggcaggagaatcgcttgaacccgggaggcggaggttgcagtgagccacgatcgcaccattgcactccagcctggcgacagagcgagactccatctcaaaaaaaaaaaaaagaatgaggaaagggaaaagaaatcccattttcatgcctataagaaatattataaatcccaactttgagactttcttgatatatatagatgctacattttaaaaatgcatcataaaggagtaatgaaatggggtctgttagattggggaaaattattattttttccttcaaacttaacaaatttgaatctgagtttggaatgaagtagctcagcctaggccttctgaattacagttgttgctgccttgcgtgatggttttggctcactttgtaagagtaatctgtcgacattgggtactttaaaaacattttttaaattcaatgttttaattctttacaaggtctaaggctgctaggtaggtagaggggagccgtccttgccaccacagatggggctcaagtgatgagcacgctgtctggcccctccagcttggcctggccgcttcagcaggtcagcaagacctcagagccccagccagacctcttttgtgggaacagggtgttattgactgtcttcttcccactcaagtatctattttaatctgccctggccttccatgccagctgagacccgttcccgggttgtgcaggaagcggcccccgctaagtgcccacactggcttcccggggatagtccgcatgcagttactgcaggcctctgccgttcactttcttctccctcagccacaccccagggagcaggatgagcagccacagatagggggtgttcatagactgctcagatgaggtgtttccagtctgcctaaaagcctcttcactcctctgccatgtcatttccatccactcagtatgacttataaccagaaggtgggccccagcagaggcaagccccacgaaggcaggccttcgcgagtcagcacttccttagtgggcgtgagaaatgccaggcaagcatttacgtgggtcctgggaagggtgggaagctttgcctaggaaggctggaagcacttgtggtggcactgggggggtctccttcacagtttgaatttgcctgaaaggtgttatctgtgggtaggaggccatctggaattattttattttattttttatttttgaaatggagtctcactctgtcgcccaggctggagtacagtggcgtgtcttggctcactgcaatctctggctcccaggttcacttgaatcacttgatttccgtgcctcagcctcccaagtagctgggactacaggcacacgccaccatgcctttgtaaaaaacaaaacaaaaaaaaattgtatttttagtagagacagggtttcgtctctgtctacaggcacacgccaccacgcctttgtaaaaatacaaaaaaaaattttttttttgtatttttagtagagacggggctggcctcaagtgatctgctgacttcagcctcccaaagtgctgggattacaggcgtgagccaccggccgccatctgggatttttaagcagcatagtgacctgctcagacttgggtttctaaaggtaggtggggcagaagtgtttcagaagaggggaggacctgggtccacaggaaggcagtggcaatgggaggtggctggtctagaggagatggagctggcaggatggtggctggaagaagggggcacacaggtgcaagcctgggggtcctagcgtggccagtagagtgtgtaggtgggactgcaccctccccccgtcccctgctgacagcaagtctatgctggatatttgccatctgccagactccaggcaggaatgacttggtaactgtggagggaggaaactcaagtacaggaaggaaggctgactggggaggtggtccccgtgtcgagggttcgggagtggatgaacacgttctgggcattttgtagtgcagtgattttcatactccgtttagcagcagcaccttttgtcactctttgctaaaaagaatattttttacatgtaatgctgttagcagatgaaagcaagggtgtgagttcaaggcctccctctccggaaggcctcataggtcttggcagaactggagcagagaaacacagttgataggtaagtagtagccagtatcatccagggcgggatggagaagtgtgtcctccgtggctacagataatctacatcagtacagttttttttttggagggcattttggtaatatctgtcaaaaatttaaatatatataacctttgacccagaatccctacttttagaaaatgatcttaccaaaatacttgcacaagtgagaggtgacagcgtgctggcagtcctcagagccctcacttgctctcggcacctcctctgcctgggctcccactttggcagcacttgaggagcccttcagcccaccactgcactgtgggagcccctttctgggctggccaaggctggagcccactctctcagcttgcagggaggtgtggagggagaggcgcgagcgggaaccagggctgcgtgcggcgcttgcgggccagctggagttccggctgggcgtgggcttggcaagccccgcactcggagcagccggccagctctgctggccccgtgcaatgagggacttagcacccgggccagcagctgcggagggtgtactgggtcccccagcagtgccagcccaccggcgctaagctcgatttctcgccaggccttagctgccttcccgcgcagcagggctcgggacctgcagcccgccatgcctgagcctcccacccactccatgggctcctgtgcggccccagcctccctgacgagcaccaccccctgctccagggcgcccagtcccatcagccacccaagggctgaggaaagcaagcgtacgtgcaggactggtaggcagctccacctgcagccccggtgcgggatccactaggtgaagccagcggggctcctgagtctggtggggacgtggagagtctttatgtctagctcagggattgtaaatacaccagtcagcaccctgtgtttagctcaaggtttgtgagtgcaccaatctacactctgtatctagctgctctggtggggacgtggagaacctttatgtctagctcagggattgtaaatacaccaatcggcactctgtatctagctcaaggtttgtaaacacaccaatcagcaccctgtgtttagctcaaggtttgtgaatgcaccaatcgacactctgtatctagctgctctggtggggccttggagaacctgtgtgtccaaactgtatctaactaatctgatggggacggggagaacctttgtatctagctcagggattgtaaatgcaccaatcagcgccgtgacaaaacaggccactcggctctaccaatcagcaggatgtgggtggggccagataagagaataaaagcaggctgccggagccagcagtggcaacccgcttgggtccccttccatgctgtggaagctttgttctttcactctttgcaataaatcttgccactgctcactctttgggtccacgctgcttttatgagctgtaacactcaccgcgaagatctgcagcttcactcctgagcccagcgagaccacgagcccaccgggaggaacgaacaactccagacatgctgccttaagagctgtaacgcacaccgcgaaggtctgcagcttccctcctgagccagcgagaccacgaacccaccagaaggaagaaactccgaacacatctgaacatcagaagggacagacttcagacgcgccaccttaagagctgtaacactcactgtgagggtccgtggcctcattcttgaagtcagtgagaccaagaacccaccaattccggacacacaagtacataagggtataagtacaagatgttcactgtcattctagtacagtacaaccacccatgaatagccagggtaatttcgctgtctaattgtatatgtgttaacatggaaggacatctgaggtgccttgttaagtagaaaaagcaagaatgagaactatggatggtcacatttctgtcagaacaaataagaaaagtttgtgtgttttgtatgctgttgtacatttcaaagccatctgaaacagtggacaccacatgttagcagaggttatctctggaacaaggggttaatgagatttcccttttctaagccttggttgtctcatttttgaattttttccctcaagtacctattactgtcattttttaaaaaagtgatcttagaaaaatgaaagccactggagttagtaccgtgcgaggagagcctgtgggcagaggaatggactggtaagggctggtctgagggcaaggcagctgggacagagtggagtgtgaggcacagtgcatggaagttgtgaggaagaagaaatgggaaactgagtcagatgccaccaaaaggtcaaaagaaatgactgtcagatttgggaggaagtctgtgtcagtggttctagcagagttattggccagtttgcatctgtactaaagcatccatgctaaaaagaagaacaaagaaaatcagggcatgattctcagacacctgcctaaaaccctgtgatgtttgcctttgagtctggtgacacggatacaactgtctgtcagacgtgggaaggatgctcagaggatcacccctggcggtagtatttttgtccactctttaaaaaaaccatagtagggggctgggtgcggtggcttacgcctgtaatcccagcactttgggaggttgaggtgggcggatcacctgaggtcgggagttcgagaccagcctggccaacgtggagaaacaccatctctactaaaaatacaaaattagccgggcgtggtagcgcatgcctgtaatcccagctactcaggaggccgaggcaggagaatcacttgaacccgggaggcggaggttgcagtgagccaagatcgcaccattgcactccagcctgggcaacgagtaaaactctgtctcaaaaaaaaaaaagaaaaaaagaaaccacagtaccacagtagttgggaccaaagtgctctgaccttgccttgtttgtacgatgttcatcctccttgacctagtggcttttttcattccttctatagttggccgatgactaaccttgaacacaaaggtaggcccacttagagctttctgcttttattcactcggtatttggtcctgtcccttttcttttggcttgaatatttcacagtcatcctggcttagcagatgcccacttctgaatagcatgttctcttcactccaggagttccatgctatttacctccaccaactagggcagttgggcttgcagaggggcctccctgtgggctgcatggccccttttggctcagctgccctccaggcggcttgtcttacagctccttttttattatctgaagactgtctcctttcctgaaagttcaccaaagaacacgcaacccttgctatttgggggttttcagagatgagcatcttaaacatgacccactttcaactttcagaactaaattttcttttgggccaggttatgtttgcttcaagaatgggattatctgtcatccacatttctattttaagtacttttttgtttgttttaccatgtcctttgagactcatgtgagtcggtttttttaaaaactatattttaattttaaaacttccttgggacttaaattcgtaacggtatgttaacacgcatgccatccgagtagaaggatttcagaagtgcagatggtttctgtccacatttgtggatcagagctgagacttcaaagaattaaaataaaagacgttccctatttgcttccttccaaaggatttttagttctcatgaataccagttcatcctctctagaatctgcgataaggtatactgttaatggtgtctctcagttgagggcatcatttcctggcctctcatttcctggaagaagtgattgattctccataccctccctctgagtttagagctgttggtaaatactgagctggccatggtggccatctgatttgcaaggtgtgagacgtaactgatggatcgccaggaaagatggatattctgcctgcgtaagcagagaaatgatgaatagtaaacatgaattagcaccatctgggttgaaatttcccactacggatgaacatttatttgaaaaaattaatgatcattgacagtttttccctcttatgcctcaatggcttactttcagaacagcttactgaattgccttttagttttggtctcaaccacttgttttcaaaagctcatccacttactaacttttaaaaaacgtataggaagctgagtgtggtggctcatgcctgtaatcccagcactttgggaggccgaggcaggtggatcacctgaggtcaggagttcaagaccagcctggccaacatggtgaaaccctgtctctactaaaaatacaaaaattatccgggcgtgttggcatgcgcctgtaatcccagctactcaggaggctgaggcaggagaattgcttgaaccgggacccgggaggtggaggttgcagtgagccgagatcgcaccactgccctccagtctgggcgacagagtgagaccctgtctcaaacaaacaaaaaatgtacaggagcaactgccaggctgtttttttgatcttaagtgagattgttcttgcctcgtttttcattgagtaggacctctgtgcagctaatagctgtgagatggagcgaaccgtctgccttgaaagtgaacttgactcaaagacaaggactgtccatgaccatggtagaagagagcctgtgtctgctgagacatttaaatcagttccattttaactaatctaacatttatgaacagctctgtggaaattagtctttatgttaacaggttcaagccagcatcaaaacctcagctaaaattagctcttgctaactgataaagcctcctgattggcctagaaatggctccagttagacaaaatgtcgtatttcaacaagttttgtttggcatttgtcacctgatattggtattggtttgttcattgaaccaacatgttcatgagcttatttgctaagcattcattctttccacggacatttcttgagtgcctgtagtgacctacacactgggccgggggtagggagacacctgtgaccaggcagacatggtccttgacctcagagtgacagttgacttgacagaagatcaagagtgtctgtgtgtgatctgcaagtgtgctaggcctgggagctctgtgccagctgcctaaaaaagaacccgtccctgccctctgggggtggacagcctagtcaggggatagacacataaaacgaagtgttctaaaagctatggcaggaatgacagccagctctagggggtgcagggcaggaacgccaagacgtgtatcaagctgtgaatgctaacagctgttcttcccccacagcatggacaaggacagcccggaggtccaccaggacctgaacgccctcaaaagcaagttccaggagatgcgcaagctcatcagcaccatgcccggcatccacctgagccccgaacagcagcagcagcagctgcagagcctccgggagcaagtcaggaccaagaatgagcttctgcaaaagtacaagagcctctgcatgttcgaaatccccaaggagtagagtgaggctgacttccttagaaagagggggaagccaatggcctgtctccccactaccatccccaaacgctccttggggcgtggttcctgtggaccccagctcagctcgtcaagctgcaggggcggggctcctgtgctgctgcgcgcgcttcgcctgtgcgggagccagcgcagagcttggctgcgccgggggttcctcgtgtagatccatatgtctagatgcataataactggagtgcctgctggtggaagtcagaatgctcctggaggctgcagagggggtggaggactctcccctgcctctggggagggggccatctgctgcgcccggccccactgacagatctgaagagcacagtaggaagggaggcggctcctctttgcttccttccctctctctcctcccacccccataggatcagtgtgtaccaggtacacattgttcctgttaacagcagcttcttgaaacatttgcatagaattcactggacgaattaagcctgcactcatatggcatagaattgtgagagaatgttttgaaaggccagagggtggcctttttccccaaacagtttggttccttttatgtttgagccagtgaagggaactacgctttgggggcttcagcctagagccctgccaggcagcccctggctccaggttccctgcctcctagcgctctcctcgccttcagctcttgctcccttcctcgttcatcaccctcagtcagtgcccaagagtggccaaaccgcttcacatctgcagtgcttccccagggttgacaaggggccgtcctttccacacaggccagaagaggtcttcaggcgaaccgaccttcccccttctggcatttcagattccccttgctctggttaaaaggtctttccctcgtggcctttgcacttgcggcagcaacgtgtactacactgcagaagggttcagtatgcaccttgtgttgagagagaggcaaccctgggggccagttcaggtggtccccaaccataagctaggtctgaaagttacacagccaagtttgagctcttaaaagttgatgaacagcctcatttccccagcttccctgatttcttccagatgggacgttttatttgtgtgctctcccttgactgtcagattgaagtaagagcagttctctccgttgcctctcgaggaggaggtgcgaagtcctggagtattgtttgggtctcggaatgggcgcataacctgcgctgaccagtttaggggcttagcagatgcctgccagctgacctcgttggcaggagggttgggtggagatgtttttagcagagcttccattagtgtagacctgtagccacctgtcagaaggtgggtggcatattggggacctgggaatgtgtgaaggaggagatcaaatttcagtggctttggacagaaaagaaggctctggatttaagcgggtggtcacctgtgagaccaggtctaccttgggactgttatttaactgaatcagttatttccttgaaatttcacagtagtgggtgggcctgttttaaggctctgacagataccacgaaacatgaagcacgtggaactacaagacccccggggtctttctgagtgcaaggctgaaatggacaagggctcctcacgggggtggagggagccggagcctgccttgtgttccttttttgacttgtgacatttttcaaacacataattaaaaggacttatgctctgctgtctcaggacataatgctttttgtactgagaaattcatagtgggatggctctcagatagttgagaggaaaatgtttctctcagtctcttcagacacaaccacacctctgctcctcactccctccgccccagcacacacacccgccccagcacacacacccgctgaaccagtgtggaacaggaactcctctcccggctggcctcaagggcagtttgcctggcgggtcatccctgggctgtccttagttgccttttatttttggaggggggaggtggggggtgccttttggtgactcgaggaggttcagtcctgtggggagccgccctcaccagagcagggttgaaatccttctaggacaattttgagtgtctctcacagggctgagcgtcctctgaaagccaccaattacttggattactgggtggccggcatttatgctaagtacttttcaaacatcacacttaatccccacagtgagcccatgccgagggtgttctctcttcccggggtgaagaattagaggcttggcaggtgtcacccaccaacaggtttgcagtactagtggcagagagattggtgttctggggtgccttagccatgagacggagacagcaaggctgaagggggatggggctctacacctggccaggagcacttcctggagctagaggggagcagaggctgaggagttagctgtttccagacagggtggcaccctggagtgagcgggtggtgggggcgcgccaggatggtcctgtttccagatggggtctcaggctctttccccagggcctgactgatgcctccaacagtccgaaagtttgcctgggcccacactgagtctggtgacaaaatggttaggcacagttccagtggcttttacgctgaagaattcagaacattctctcagaaaatgaggccttttgtcatctaacccaaagaaaattaagcgggtggatggctagaaagagttcatctccaggggggaccctgaaatcctttatattcttcccggttttctagggaaccatcccctacatagatgccccaggcatctggggcttttctggcagctgaagctgccttcagaaggccagggttattttccagttctggggaaggtaagttctagttccacctaagtcaaagcccagccctttccttctccccacccttccccactccagccatctctaaaagcaaaaaaaaaaaaaaaaaaaccggttttccattttaaattattttattgtatattaaaaaaccaaataaagcaataactttaaagacctcagacacacacagtataaacacctgggtaaggttttgttcgtgtccatgttgacaccggaactaccgttaaagtgcaagttttgttttgtgttcctttgtgcagtttcactcacatgtaaacaagtcacttggctatgatttgacccacgcccccccgcttagttttgggagggcagaggctctaccggctgtcacagcaacccggaatcacagacaagataatgccccgtgggtcctgaccctcaagcgggcatgacggtttcttgaagcctagcagaggctggataacttcacatccctcccccaccccgcgctcactcttaggtctttgagaagataaatccaccctcggctgggccctcgctcccaaagttatgggggtggcgggcctcaatgggggaccgggggtggggaatagtcccagtcttggcccgttctctttccttccggagcagatgaccgtcccttctcggttcagtggcgcctccccagtgctgggggcggatcgccgggaggggagacgccagtccgcgcgcgctcccggcctggggcgcaccgggccgttggatttgacttaacaaaaaggtcctccttaggttgtgtcgccagcgcggcggggctcctagctgatgacgcagcgctccttgtccttggcctggctgccggcgctggccttctcgcggatgtacatgaggtcgctgtgtacgctgggccggcgcgcgaagggtgccacgatgccaaaggcgtcgcccgggtcgccgccgccgccgccgctgccggcccgcagcagcttcttgttccgcagcgccttcttgtgcagcacgtcgcagtactgcaccgagaccttgcggtgcaggtctgggctcatctcgctgggcagcttggccatggcgaagagcgcgcggaacatctggtccaggctgctgttcttcttggccgagatctcgaagtaggcgcagcgctgggggtcgtcgcccaccagctgctcgatctcgcgctggtccacctcgcggtagaagtcgcggtcacccttgttgccgcagatgaccaggggcacgtccacgttctccttggttttgttcttgaggcaagacttggtgtcgaggatctgctgcctgagccgctgcacctcctcgaaggagtcgcggttgtccagactgaacaccaggatgaaaacgtctcctagagggggcacagagagcagaaaaggagaaggtgagggtggccgcccaggggacaagtcgggctgactttgaggccgcgcggggcgcgctagcctctctaagcgcgaagcgcactactcggcgcgcggcagccggaccggcgctcgcggggcgccctggccgagggttccccgcccttccctcccgcacctgcccggcccccggctcacctgtgaggatggagaggcgccgcatggcggggaacgggtggttgccggacgtgtcgaggatgtcgagctggtagacctcgccgcggatggagtagaacttgcggtggaagtcctcgatggtaggcgtgtaggcgtcctcgaagcggccggtgaggaagcgcgacacgatggccgtcttgcccaccttggacgagccgaggatgaccatgcgatagcagttcttggccgggatactcagctccgagtcgctcgggcacatcttcttgatcatcgcggccagtttcattgggcagaggggccgcgagggcgggcgcggggccgagagaagggcagagagcggctgagggtcgctggggtggcacgcggggtgagcggctggagggctctgctcgggctgggcgcggctcgggcttggggctccggctccgctcgggctgggctcgggctaggctgggctcggctggggttctcccaggatctgggcacaggccgcttgctctggctttggcgcccggccgccgcccttatatgcagcctgctcggctgccccgccccggccctcccagctcggtgcgtcacgccccgcggggcccgcctcccccgcaccggctcccagtcccggcgacctcgtcacccgctgccgggctcctgctctctgggcgcgggggctggggggagcagtccagggtcgggctgaggctggaggcgctcggactccgcttttccactgccgcgggctcggcggccgcaggggcgtcggggttctggtcccggcggtgcccctgtccctctgcgacttcgggcaaggacccccattcctgcacctcccgcgcgcgtacacttattttctttggttctcagtttccccagagaataggaatctagtaagtaacccagtaagcgcagcagcgtttgctgagtgcttgcgcggaccgtatattgcagtcctcagagcacagccccagccccagcccccttccgctccggtccccagccgggctcttgttcccgggaggcgaccgccgggcggacgcggggtttcagggcctcaggcgcggagctcggcaccgcgcgctcgggccgccagagggcagcagagggcccggccggcggctcggggaggctgtggccgccgcgggcagagctagaacagaggctaggagcaggcgggtggggagcggcagggatggagcaggggtctcagggcgccttgctggggcccaacaggagcggtccccaaccccgcgctctgctgcaggcctcagcctgctcctttctcccagccagagatgctctgtggtatggagggctctgcagccagcggcccaccccgtccatcatagcattttgggcttttactgtgccgcgcgtgggccgacgttctcattgtctagctgagagacctggagctcaaagccacagcgagccaggaaggccctgggagcacagcacagcctcttgctttctcctgggcctcagttttctcttctggaagatactgattctggttctgtgattaaggatgaaaatatgcaaatgctttaggagggcggggcctggtaataacaatagcaacaataacagtagtattgacccatgaggcctggtgggggtactctcaagagcacaccaggtcgatcagtaaccaggagtggggtgatgttgctgaacattggcaacaggctgtctggagccagctcctcagccctgagctcttgaggcagtcactgctcctcaaggcaacctgtgtgctcagtgttttgctttggccacgtctgacttacgagaaaactagggagccattagctggcaccaccggcccagctgtcaggtggtggtctgcaggcagtgctgtgagtgccataccacccaccccatgcctacccacctccctcccacgctggcacttgctgtaggggctgctgcaggacaccactaacttgtttctcagcccagcttggcccccatcctcagagtccctgcatctctcccaggcctcactcttactgtcagatatttcaaatgcacgcatcacacagtgagcatccaagggctcatcagtggccctggcctggctctgattcctggtgtcacttatgcagcagttatccgacaggctagctggggctggagccccgccattcttggttcctgcccccatctgaggtatgtctgccagagtctgggagaaggggagaaggaactgagtcgcagccctggatatagggctgcagtggtgcagggtgttcactgcataaaggagccagttgagggtacatgggggggctcagttaaggtacggacctgaaccaccttcagactgagcaccgccttcctgtgcctcccacagcggcactgcatgggcagccgggctctaacttgggatgactgatggccagggctatagtgaaggtggaccccacacagccattgcctcctggggctctagtcccaagagggtccatttgatatgagtggagggcccgagggtcaaggatcacagcccagctctcccctggtcagtgtccaggctggccccttaaatcaggaacatgacactggcaggcactgatctagcctgtgtcctcagccacagtgattcctggtaccatctgtgcatggccgtctgccctacggatgctgggttgtgaagacccaggcccacctgccattcccattctgaatgccccagagcgcctcctgtcaaggaggtggcctctgggactttactcctcaagcagcaagccaacttccttgtttccgccctcgtcttttcttttaaaagggcatctctttccttttattacaaaagtaataaatgctcatggttttttaaaaacccaagccatttcagaaaggaccagaatgaaagaagcactgggatcaggcctctctcggccacacccaggacagcctagccaccaattctgtggggtggcatctcctgatgtccccacatgggcggactcccaactgcatgaaggaagtcttaccccggtgcagcctctgccacccagctctttgttcatgcaggtgccctttttccttcttctggggtttgcctgtgtgactttatgccaggccctaccctaggctggctaatcagagtggccggggaggactgggggctggaagacaaacaggaacaactcgcaactcacagaaccatccgccccgtggatcccggagtcccacagagagggagcacgtgtactgggcttcccagcactcccgccgcctgggccctgtcagccatcgcggcatttgatgtccaggttgatcacagtcccatgctgtatgcaataaataattctgttttctgtgtgtttggggcatgagacaacaaacagcgtatatgaggctatgagcctgtctgtaaatagtatttacctgcagtgcagcaattttgctgcttagaggggaggggaactgtttaaaatatttgacaatgtcgggggtgatctgggggtgggcaggtggacccaccccccccccaccagccccaggcaggaaatgccagccacacagcctcatttgagggcaaagagcaattagaaggttcttgagagctgggccagaggagaatgctgggcaccccatcagagctttgcctgttgtggtgtcctgagacagagtccacacaaaggccagaagtggctacttcaggtgacaggaacccagagcaccctcgggcctgggcattgccgtgctggcccgtgcggccagagcccatctctaccagcgccttggacagaggaggccctgaggcacgcttctatcctgtgtggccctggtacgccacctcctgaagaggaggaaaggggcaaatagagctggctttgcgttccctctgacaggctcccctcatcaagctgagattttaactctggtagattcctcatcagtgatgagctctgtacccgacagagcagacccttccagcagaagccagttcagcccaaggctcccggctctgccccaggaaccaagggtcaggatgcacggagctttgctgcccggctcagcccatccatcagcaatatgtcctcaaaggccgtgtgtgcagaggtgctggcggagggagtgagcacctgtgcaagcaggagcaggacggaggcactggatatggtcagaccggacgcctctcatgcccctcaagccctgagacagattctggattctagaaagcaaagagaaaaccttgaggagctccatgggtgataagggaggcactgcctgagcacctgctttatacacaaggcagtcatgactatgatggccattttacacatgaggggccgcagggtcagtgtgtgcagtgtccgtctggcccagtgccacaccatgcctttccttggtctcgctctgtcacccaggctggagtgcagtggtgtgatcttggctcactacaacctccgcctcctgggttcaagcgattcccctgcctcagcctccagagtagccgggagtgctggtgcatgccaccatgcctggctaatttttgtattttacctcaggacctttgcattgccactcccgatgcccggaggctcttcctccctcctgcttcttcttgaagttgggtcttggctcaaatgccacctcctcagagaggcccacttgaccaccctagcgaaaacaggtcacactgccatgtgtcccttccaaaatttcctgtgtgatggttgtcactgatcattttctggttcatactattcacactgctccattttctcttaagtttttaggatactagtctgaatcacagaacaatactgcttttctttttttcttttttttttttttttttttgttgagatggagtctcgctctgtcgccaggctggagtgcagtggcatgacctcggctcactgcaacctctgcctcccgggttcaagcgattctcctgcctcagcctcctgagtagctgggactacaggcgcctgccaccgcacccagctagttttttgtatttttagtagagatggggtttcacatgttgaccaggatggtctcgatctcttgacctcgtggtctgccctcctcggcctcccaaagtgctgggattacaggcatgaaccaccatgcccggctgaataatactgcttttctaagttagaaatggtcacatgcagtattggcaactttatatggtccaacttgatatgacttggctatagtagggtgcacagatggaaagtttacagcttgaaggttcccctctgtgcacacctgtggcagcaccacatccaagcacaggacacctccagttctgaaaagctccctcgcgccctcacctggctaagcctctgccgactacactggcttctaccaccgtagatccgttttgccttttgtgtctggtttcaatgcatcgtaggtccacgacatccttccacaggtaccggccactcattcctttccttgctgcaggggagaccattgcgtgactaagccacgacgtgtgtgtccactgtcccgctggcgaatgctgggggtttcaggagacaggatgcagtggggatgggtgttagttggtgctcccaggcacttgtgtctgtggggagacccagggtggaactgctgcatcataagtggccccccacctacggaaatgcaccatttctccccaaggaaacaatccagccaatcccaaatggcaggactgcatgagaggtggccatccagggggtccagagtacactgacaattaaaaaaaatgatcggggctgggcgcggtggctcacgcctataatcccagcactttgggaggccgaggcgatcagatcacctgaggtcaggagttcgagagcagcctggccaacatggtgacatcctatctctactaaaaatacaaaatattagccgggcgtggtggcagacacctgtaatcccagctactcaggagcttgaggcaagagaatcacttgaagctgggaggtggaggttgcagtgagctgagattgcgccactgcactccagcctgggcaacaagagcaaaactccgtctcaaatataaataaataaaaataaaaataaaaaattatcatcaaggtgggcatgtaagaagatgcacgtgctgtgaaaaacaggctagaagttcctcagtgggtccaatgtgtgagttaccatatgacctaacaattccacacctaggtatttgcccaaaagcaatgaaagcgtgtctacacaaaaactgtccacaagtgtttacagcagcattcttcacaacagcccgaaggtgagagcaacccaagtgtccattgcctgatggataaacacagcatctccatccacacagtggaacactgttcagcagtaaaaatgacgagtgctgaggcatggcactacgcagctgaacctcaaagacacagtgccgagtgagagaagccggacaccaatggacaaataccgtgattccatttataggaagtgtccgggagaggcaaatccatagagacagagagcggcttggtggcgattaatgctggagaggagtcgggggtgacagctcaggggtacaggggtctctctggggagtgacgaaaatgttttcatgattgtggtgatgcttgcacaactctttggataaacaaaaactcacagaattgtgtgtatggcttgtgaattgtatgtatgggtgaattgtatgtatggcttgtgaattatatctcagtaaagatgttaaaattataatagaaatgaaaccataaaattggccaggtggcaggactgtgtgctccaggttgagaagcgtgaatctcgccccctgatgaacaggtactggttccagcccagccctctcacgacacccggcagccacctgcctgttgcagagggactcaggatctctccagctcccctggacccgcccaccatgggggctacccttttgttccccattcatccccaaatcctggacattctcccccttacacatctctcatgttccctcttcccacctcacgcctctgtccagggcctagcaccatcaccactgcccagaacaactctgtaggggcctccccaccctgggggcctcctcacagtaggagaccctgtttccaccctgcagccaaggggaacctgtcactttcctcccatacttcatttgtttcttggaacctgagtccctcaccaggcctgcctgttgcaagggacactcgggagccctggaccctctcctgggtcggcccaccacagccgtggcacatgctgttcccttgggcgggaaggctcctcacccaccccactgcctcacctcctgacacctgctcacacccagatctgacttcaaaactcacctcaccagcgagaatgattctgcagagcctgaggacgcagatcgatcatggcagcgatgagaggaaaacatcccgccctgtccccatcctgcagtggcttgtcccaaggggtggcgtgcccctgagggcagggcatgaaaaccatgctcatagctgagtgagtcccctgcctgtgtcatagaaggactaactcaatattgttggatggatggatggacggatggacggatagatggatggacggatagatggataggggtgtccaggtggagggaatggcgagagtagacgcaggaataagcggaggtgatctgagacctgaagacatcgcaggagcccagatggagggaaggaggccgcggtgggacaggctctggggagagaataagtcctgggccccagggttaatgggccaagacttccttctgaggacaacagggggttgagggggtgtcctgaccccatttgcatttggcagggggggtggtgtgagggtgaagcgcaggggtgagtggggagtgggcaggaggtgggagccctgaggggaggggcccactggactgagccaggccggttgccagggaaccaggcttcctccggctgcacacacagctgggtgctgagtaagtggtacctaaaaataaagccccccagtgggggctgggactgatggggagtggaggtggggagcagggaactgcctaggaacatgagcagtgctcaggctgagactttctggcacctcccacccatggcccggatcccaggccgagcatcctggctggggagacagggaaggaggcccagagagagaaggagccagcacagctgagggatggagaggctctgtggcccagaccctgaaggccacctgcctgggctgtggggcccggtcaactgggcacctgggatagcgaagacacaggtgagggtcagccttgcccagcaaccctggcaccatcatccactctacctccatatgcagagtgggaagttggggaacctgcccaggtccaggggcgagggggctggggctggggctggggcaagaggagttcagggctggcagccctgcctccaccatgtgccctgggggccaaggaagtgggacaagaggccgtgtgatgaaagggtcaggttcactcctcggaagccctgtggcttctgacagctctggcctggggactcctgtgctggggggtgagtctccttgcacccgcctccagccctccaaggagagggccaggcttgcctggaaggctcaggaatgcggcccgggaccccatcttggcggtgtgagcacgaagatcctggattgagggcgctttgtaaatatccattcaggccgtggctttgcagccctgagcgaaagtaacgggaggtcaagggaaagccggccctcggccactgtctctgagcttgactgaggacccctggagctggaggagggcggtgatctgcctgaggtcacaggtggaagaggagaggggctggaacaggtggaggcctctccccgcagaaccctaatccccacacggcctccgggagcccctgactggccttcggggctcacagagagaccctgagggataatgttgaccaaagctgaagggctgagggcctctagcaccccggggagaatcaccccaaagcccaccaagcatagaagtcctcgacctgccccagtcagggggcctggagtcctgggggctgaggggtgaccctgccaccagcagcagaactgggatgaaaacaggaagtggcggcatggatgccaggaggagagggggagggtgtcccctctgtccacctcaggagtcccagtggcaatggctgagcctacactcctggtcactgtgccctgcctcccccagatgaggcttacccttgcagggcccacccctcacccccatacagacacatagggtgcccagcatgtgtccagctgctggtcagcacaaggccattcatttaggaatgacagtgtcatctgcccagctagactggggtggccaaggacaacatgcccacacctctccaccctcatgctgacggacacggggctggatcctccaagggaagaggcagcagaggggctgtcttgggtgtgctggggcaggggtgggagcaggtgacacaagacaccaagtctcctggagatgaaaccatggccatggccaggtgagcccctgacgcctcctaagtaccttactgggaggcctggagagaggtgcccacccctcagctctgagatttcaagacagaaaggctggagccagccttgctcgggagctatttgacctgatattcgtgccccaggcctgctccttccccacacagacagacagaggctggagcagatgttggggtcagggtgcctttattggtgaatgggaatgtgtgggttggagctcaatggccatatgtcggcacgtccagggtccccaaggcagcaggttccaaggcactggggcagcccacgccgggggcgagccctgagcagcaggcaccattctcgccctgcgcagggcctgccacttggggcaggccaggaggctggccaggccttcagcaaagctgttgcagctcaatcagctcctcttgtgggacccggaggctttctgccggtagatctcagcggtgaagggcctgccgggcagcggggagaggcttcggtcagcaggtcctgggggtgacccactgcccgcaccagagctctgcgtccatcagcttgagggtgtccagatgggaccgggatccccttcatcccccagagccactggggcaacactgacttggagccttcagagcgcaggcgggagaggggaggggagaggggccggctgcctgctgggtcctgcaggccgcattgtaagctaccatggccgctctgacctgggagccctggagtgggcctggctgacggcagcctgtcctgagcctgccctggccacaaggaaaggttctagagggagagacagggccagtcgggcagccacgcccccacccgccgcagcccctactcactcttcgtataggagagccactatgtaggtgagggccaccagcaccgtcaggagcaggcccgtggggctggcgtgcctgaaaggacagaggcaggtcaggcctggctggagccagggtctctcagggccacggcccacctgcccaggctggcccttcctgccgtgaccctggccctccggccgacgctgggccacttgggccgaccgagcccaggcagcactgccccttcctgagtctggcttttgtgccaggaccagggtccccatgttctcggtcctgatccatttatcatcattgtctgcctgtctggcctggctgggttccctcagggtggggcctgctcactctttccgggtctccagccgccagcccagagctgggaacgcagccccaggcggaagagtcccagtggctagggctgttcattcccgcacaggaggagattctggggcaaagtgctcccgtctcccagaaaccatgctctgaggaacaaaggctgttttctagaaatgagtccagggtcccccaaagccagtttggtccaccctgagtccccagcccctggccacaggtgcaaccccatggccacgccctgggaggatctggctgtggggaagggggcttaggagctgccgccccgcccagccctcaacacctagcccagcttgggctctcccaggtggtgggacagcagccccacgcccaggagcccccggtcaccccagcccagaggacgggaggccccaggcagagcatacagcaggcccaaggccggatggagcatcgccaggggctctttgctggtgaccagctcctgaccccgccacaccagtaagcagcggcagctcgtcagtgacggcaccaaggagcccgggcgcagctgctttgggtttccagaaatagctgccgtcaagctgtcccccaatctatttctatagttacctctgatcccacagctcccgcaggtgctgggctgctgccagggaggagggagggagggaggaagagaggaaggagagggaggaaaggagctgtctggcgggcacagagggcgcatgggcaggcctgggccaggggctgtgccctccttggctgcccctgtgccaagctgccccctccccagccaaaccatcacaagaacctcaggcagggctggatcgaggtgagggctggaggacacctgtggaccccgtggggaccctctgccctgcccactgccttccacccctggacctcacactggtctgcctgtctgggagctgcaggaggcagggcagacgtaagcaaagatccaagcccaggctccaaccccaggcctggcaaccagcagcgaccccactgtgggcgccgagggggacaggagtccctgattgcacaacacgaagcaggaggcccacctgtccctcacagccaggccaccacctctgccatctgtcccctggcatcgggctcactgccacacagcctgctggggtcctacatgccggggagctcagacacctggaagcccatctccggggccctggcaggtgagagacagatgggccgtgggaggcctgtgggggtccccgctgtgtcagcgtctggccagataatggctcatctctaatgagctcctggaccattgatgccatctctcagcacgctgcatggctgatgtcctctggaggcggcttatgcgtcccccagagccctggcctggctgccccgagcccaagggtgactctcactccagggcacaagacactgctggggacactaagccactggggaggcaccgaaggttggggggttagggagggattcgtgcaggagggaacacttgacgttgggtttggaaggactgacaaggggcataagtgggagggttctaggcgagggaacagtgtgtgagtgcatacatgcatgtgtttgtgcacacagaggagaggggggagccaggtgtgttgggaaccctaagcctgcagggacgacctgggtgggggggattgttttgagtttgggctcatcctgtggccccagtgggggtgctccatggccggtgagcctgggggcacatagtctgggccttagcaggcagagggaccaggctagaaggcaggtaggacgtgtccctggggactgcctggcctggacgtggggtgggggtagggtgggtcccagccagacccacagccccccttctagcttctgctgtctccaacccccgctgctacggtcccaactgctgaaggtgggagccaggaggcaacatcttgcgcttgacattcactgtttacgattcactcctttgggatcctcaggtcttgtggagaacctgtaaattctaggccagtggttttcaagtgttaaacaaaagcagtggaacactgtctgccaaaaaaccttctatggaagaaaatggctaaactagaactgctggggtgggggctgggtatgaagccgagggcagcgcccgctgtgccatccttgaccgcaggtcctctgacccgccgggggagcacatctccataccttgtcagtacccgtacctggctgaggccgacagcagttctaggcttccctcatggcacggggccccctctgtgggaaggggtatctgccacatgggcagaggctattggggcacagggagttctgtcagctgcgggtgagctgggccctggcggctctggccaacccctcctgcggggaagatgggtcgggtggtcccagccctgatgtccccgcacaagggtccgcaaactacggcctaggggccaagaacgcctgttacatttttaaacggttaaaagcaaaaggatcaaaaagaatgtttcatgacacgtgaaaagaatctgaaatttaggcttcagtgtctgtaagtggagctgtgctggcgccaaagacgcgcatccattttcctgcgtctgcagctgttttgtgtggcaggaccagggctgagcagctgtgacctgcctgcagcctttgagcctccacactccagccctctttggagaagctgaccaccctgttctgggatgttgtttctgttaccatagataagacgcttctgagaaagggagaaccagggcgcctaggcccccacaaatgacacgttcttcctttctctctctccaggggccctggcccccgcgtcctgagctgcaccagctcctctccgggaggtggccagcagggcagaggggtggcaagcctggtactcacatgatggcccagcccaggtagttggctgtgcttccccagtacatggggttgtccaggatgttgaaggggaacacggtcactctcgcctccttgaggatcccgaagtaatcacctgtggatgaggcaaggcagggtccctcggctattcatcagccctggccacaccatcactgagggaggccccagagcgggctgtggcgagacctgcaggtgagacagggccctgccctccaggagacttcagagagttcaacaatgggcagagtcagagggacccaacaggcacgcagacagcagagggcgtggggcctaaggactaaggtgctgagcaccgcccctgccccactgctcctcttctcgagcactctgacccagccatgctggccttcctcttcttcctggctctgcacacgctgttccctcccctgcgatgcctttccctgctctctgtacagagagcgcctttcctcctcaggcccttcgccctctgctcatggcgcctctttatgcagacccttcctcttcctgtcctacctcccactcttcctcgctctggtgagttcctctccctctaggggcctcagctggttgctaagggctgctctgctccacaccccaggctgtgtggctctggcaccagggcctggccacagcacgcctcccgttgctctgggaggtcagctctggtattgttttctcactcagctgcccagaggagctagacccagtggagagagggtgactattgaacagcctgttccagacaggccagccatgcacccgtcagccgcacagccacaaggcgtcccccggcagagctgctctgagccataagggagtggccggggtcacagtcacagtgtctgtcccaggcccacagaggacagtcccactggacacagagtaaccgctccataaagggtgtggcttcgttcctcccagccttctgtccccagaaacccctcatttgtctctcctcccagaggacaatggagcttcatccaaggcggaaagtagggcagctgcccgacaatgggcagcatgggcaggaggggtccaggagcttcatcaccatctggggacacggggcagggcccaggaccactggaaagttctttcttcccaggaagcaggaagtggggcacagggtgtgcgtagatggcacagaaacccaattcgagctgagtcacagcaggaagtgaccacctttgcctacataccgcgctgctggtcctcggtgtttctaggccatgtctgctggcagggccgccaggaggctgtggccactggtgtttgcaggctccttccctccctctgactgtccaggacccccagcttgttcttccactgctgaggggctccacccaccatcctggctctccttacgctgcctctgcagccctccctgtccagatccacccgagcactggccactggagggcccccgccgctggtctcccacaggacctgattgcacagcccggagtcccccttcccatggggccctcaccgccctcacatcctggaagggcccctccacagctcctcctgagccccacctctgatcctggctccatcggtccaacctcttccttgctgggaccccccctatggctcccacctctctggggatggagcctcagccccttggatggccttcaaggcctcggctcatcctcctgccctgtcccaaccgacagcacctgtgcggccagtccagctgccccccacctccagctgccagctactctgccctcaacctccctctccttgcaccaaggcttttttctctttcctacctgcccgcacctgcccccacctggcagatccagacgctcctggctgctgtcccccttcctggaccaaactccctacagcgtctgcctgagcaggaagcactgaactgcctgtgggtgccccccacagtcccagagaggcctggccatgggcgatccagaatgctgcacccacagatgccacttcctccctcggggggacccctactggcaggcacaagctccttgagaacttggagtgccctgtgacagcccacggtgccctgggggctgggcccaaggagctgtagccggcatctgaggatggggatggcaggcaggcccgggagctcctcaggacaccgttggtcccaggaggctactgaggccactgaagccgagtgacttccaagctcctgcactggccagggctgatggggaggaagacgtgggccttcccacccatgacggagagcgggcaatgcggccagctggaccaactccctgctcactgggaggggctccccttggacagggactgcctccttctctccttccaggttccgaaggccccctcttgtcccccacccctgcccccatctcccctcccaccccgacccctactgcctttcccatggctgcttttctttcccagattccaaggagctggaagttgctgccatcatcagggtcattggtgggcgtctagccaggccagcactgggctcacagcctgaaagcacctcagccacaggcagagggaaatggagaagggataaggtgcctccacccctcacccctccccagacctacaccagccctgcctgcggccaaacacggcacaaaccacaatcctgcctggcctgagagccacgcgtgccgggagctgccagagaggtggctgactcaccaccacctcaggcttctgtgcaacaaggcctgagagtcttctgcaagggggagctggtgctggagctggactcaaggagtcctgcacccagcccgggccgcagaacgggcattgagtgcatcttcattagctggagagaagcagcaggagctgccttcactccccaggaggcagccgctcagcacgctggggtaagaggagctgttggagcccagcctcctgttctaaccacagacaagccaggcctggaggagcaaagacgccccgatggagggggcccctagcactcccaccgatgtcacggatagcagggcagcagccacctggccctgcacctccctggggctccagcggtcctgctcagggtcaccccagccctcagggtcttacctaggaaagttccagcgaaccccagtgcaaagaagctggagagcacgagcacgacgcccagtcccaggagcgcgaggcccaggctgtaggccgcgggggtgtccaggctctccatcctgggctggctcagcatggcctgcgtgaagctgtgggcaggggatggagagggaggacgtcatggccagggaggatgtcacagcccgggaggaggccgacctcatcttctcgccctctccccagggacccttagagagtagccagcccagggctgccaggccaggcaggcagcaggtggggtccagtccacctgggaggtgggtgacagtaacagggaggggcccaggcctgtcagatttttaaattttttcaagagaagccagaaatcctgactcgtatgtgaaatatcctaatttttagaaatagacaattcatgaaagccactttagaccctgcatgtgagcaggctggattcagcccgaaggccaccagcttgcaaactctcatcctgtccaatgagcaactcatactatggaggaaagtgaggctcaggaaagacgcaggtgccaggttgcagggcaggcccaggtgtcccattccccaacagactcagtgccccgaggcctggggcatgctctgtgctagggattgcgcttccacagcccctgtgggtctggccacatcctgggtggcttgacttgcatttaaaggcactttgggggcccttaatgtcctcctccacacctgaattcccccactaggctccctttggggccaaaccactgaaggccttgtaaaaaggtagtggggtccaggtgtggtggctcacgcctgcaatcccagcactttgggaggccgaggtgggcgggtcacctgaggtcaggagttcaagaccagcctggccaacatggtgaaaccctgtctctacccaaaatacaaaaattagctgggtgtggtggtgggcacctggaatcccagctacttgagaggctggggcacaagaatcgcttgaacccaggaggcggagtttgcacaccactgcactccagcctgggcaatagagcgagacttagtatcaaaagaaaaaagaaaaaaagaaaaggcagtggcgtgaccaaaagggggtgactatgacagcagtgggtctagaggctcaggttctccagttggctccggagaactgaggggctggtgcagggagggcacaggggctaggcatgtgctgatgtacccaggcctcatcacaggggagcgggcgctggtgggaagggggccctgggtgctagatgagaggcacactcacaggaaaggctgtgtgtgggagcacggacatgtgtgaccaaatgtgctcttcccatgctcacaataatcacaacacagaagagacatggagatctgctacctcacgcagggcagcgcctttcacacccagtctgtagacggcatctcccagcagggccagcttaccatccaccccaccacccatccttcctccatccatctatcctctatgcacccacacatccatccatctgtccagctatccatccttccatccatcaatgtatcctctatctgcccacacaaccatccatccatccaccatgaagtatctttgtttgctaggctctttcaagcagattgaagcccccatcttcatccactcgttccattcattggtgaattcagattgttgtgaaactccttatgctgagctaaggacatacagacatgtctttatgcctccctggaactccttcctccagcttgactgggagctcttggggaacagaagttgctcctccttccctgcgtatccccccagcacttggcccaggccacagaatggatgtttagtgcatattcatcgactggagagaagcagtagccgctccttccttctcctcccatccccaagagcagagaaggagccagggagaaagggagaagggcctgtggacaaagccaccaggacccggtggcagaggcgggcacaccgacctgttaaacagcggcattcgggtgtcagggcaaacccactgccggtcatgctgcccatacccccagctctccacccaccagtgccctgccctgatcctgctgctgcccgggctcagggtcaccccgcagctccaggccgagcctctgggattggctcagggtcacgggctgccatggaatcaggtggccacatgcacacccagtgtggtgccacgatccaggcacaccttctcccctgcctggcaccctccactctcctgcctgcagatggtggagtgggagggaaaggaagggtgccggccctgctcaggagcatggctcccctgcaagcatctggctccttggctgccactgcagtggggaccagaaaacagacaggggttgggaggggcgaacaggggagagcattccagaaagaggaaatagcagggaggtgtgccttagagtctggggcagggcatggagcagggaaggtgcaggcctcggcccggcagggtttggaatgcactctgcctgctgtggaaaatgcagaaccagggagacccatccaggtgctgcaatagggggtgggcgcagaggccaggcccgagacgctggagggtcactctggacggagactctgtcgctcttaccccctcctgcggagacccgagccaggcctgggtccataccccatgctcagggttcctctgccagaattcatctgcatcacacaagcaggcagcagatgaaagggaacttcctccctctggtgtggcccaaaagcccagctcattcagggcccagcttccctgggggcatggctcagtaggcaaatcagatctgcttggaagcagattcctgatgaagggcagatccggggccagggagcgggtgggagaggccccagatttgccccagacctgaccctcagtcccccagctgctcctccgcctacggccccagtcctggggcctttcctttcctttctctgagatgacagcctgggctggctcctggcacaatgctctgtgggtcatttgctcagagtcggcagaggaactgggctgagctcctccctggcgttctcaccaagtggccccttacccagtcaaatacactctgattctagattccaggtttactggaatctcatggcccgaattaggcaatcgacagtgttctagctcctccattaagccaggaaagcacagtccgtccattccacagggaaaattagtggatggatgagtagctctgtgaccacaagctccctaacagaatgaggtaatataggacgcaatttcccttggaagtattccgcactaggggtggggaacggagactcattcatttgccttgggttctatttttaagacctggattgaaccttcagtcattaatgtgatttgaggctgtctgcactctgctcccataaaatcccggaaaccctggggtggaggtggggagggggcatcactgccctcagtgtccccgccctgtccccagccagcagtcctgggccacacaccaggccagaggcacacggccccacctgggacaggcctgtcccgtttctatctgcagccgaccagaaacacttccctgactttgatcatcctggggtgtctccgcaacgtcgtccacatccatgtgtggcctgagtgccatgtactccacatccttcaccccaggcttggagtgactcgctctttccactccatctcagctacacgacgctagccatgaaatgagtcgtctgatgggctcatttcttttccaagacatattaaaataagcatgtaactactaaaacaaaaaatgttcatctatgcaacccccgagaccatcaaagggcttgaatttcgggctttgacgctgcactaattctgagcatttgaataacacgtcacctttccaaagtgtttccagaacccatcaatagctgagagagagtctgtcttgttttacaaacagggaagcagatggtagaaagcaggaggggcaggatggctctcctgcctcctcacgacctgtaaacagtgggataggctcaagcctcacgggcaggccaaggacaacaggcagcagtatcccagcacccctagcacctgggaatcccaggctgacacccactctccttccagacttcctggccgtgtgtgctttggggatggggagggtgcctcttccctccttcccagccacagcccctcaggtgccagaccagcctggtctaccagggcctggacccactcttgccgaactgcagcccctctccctccttccttcccagcagctgggggcccttgtgcccaggaaagcctatgccagcttccctgtcctaagtgtccccccaccccttactctccagctgccctcatggaccccgcccagtggctaccccaggcacctgcctcgaggaaatcactctggtgaagggatttcacaaatagaattcaggtcctaatcagctggccttgagttaatcaaaagggaggtgaccctgggtaggcctttccaaaagggtctagaagccagagagaccaaaagccaaagccacagagctgcctgctgtgctgcggggaggccaccaggagctgggcctcaaggacccgcgtcctgccagcaacccgaaagagtggaggaccacgccttgggtgagctcacacccagcaggcaccttgattccagcctggggagtccctaagcaaagaccccgcccccgcatccagcctcctggacacagaaactgtcacatagtaagtttgtgtggtttaagccctaagtgtgtgggaatttgttacacagcagaaggaaactaatacacttggcttcccagtccacagactctttaaaaattctggcctgttctgccaagacagcaggagtcgcttttttctgccatggaacgctgcacacgcccagccctccattgctccatcggaagcaaactgtcccatcagctccatgccctccctccttcatgcagccgctcaacccccggcctgtcctgaccacatccttgagcaggtccggccaggcactgggtgggatgcagcagtgaccaggacatgtagtcaccaggacagagggccacctgtgccagcctcctccagggccacagtccccaaaggcctggcctcagaatcatcagggagtttttgaaaacagacttccctaggggagaggggctctggggtgagtctggtgtcccacagggttgcacctgccccacggcctctagtatacagagcgctgaggtgagtccccacctgccctgcccctgctgcccagcctgtgagtgggggccgccctctcctgggactcatgggccctgcccagccatctgaagagccggctcactcctccaggccttggtcgtaaggcttcttcagccagggctccgcctgcaccccacccacccagaccaccttccagagaccaccctgcccctccaggtgcctcctagcccagcctgggaatacctccaggttgaggaagattcctgatcgacagccacactccgaggccaggatgcagcttcttagcctggctgtgcccgccacaccagagcacacaggagcctctcccctcagaagacccagagggagccctgggagactccaggcaattccgatgtgcgctggagcacagttccatcccgtgactggtgaacgacaccaggagctcgctgatgccctaacaagctcggctgtctcctcccacagccaggagggaggaagggctgcagcccagtcctgtgaagcccgttcgagccctgcctggccatccacgcctcgcccacccccgtgggctttctcgagaccagccttgtggctcatcagagggtagcggtccagccaaagctggccaagttcagctgtgcagggggcagctcaggcaagggacttcaacaagtgccccggagcccatcagccttcctccccattcacactccacagccagagcaaacaggtctgtgctaatggccccttcgggactggatggagcacacctgcttccagataacagtggctcatcctgccccgggcctcccctgaccacctctggatgcactgctggtgcagacctgctaacatagtgacctactctcccctgggacccgctggcaggtcagctgctggtggcctctcggacatcccatccatgacccaggcttggctcaagcacgtgcctgtgttctctgcccaccaaccgactcctgctgggtgcagaggcttttgagcacagcctggaccccacaaagcttgccatctcccatggagaacgatgccacaccccaaaggtccagaacaggcacactcatggggacagaaagcagacgagtgctgccagggactggggggcgggagatgactgctccaggcctatagggtgaggaaaaagctccgaaactagtcaggaggaagggctgcacaacatcgggaagctgctaaatgtcactgaattgtaaagcttaaaatggttcataacagtttatgttatgtctattttactgcacaaaaaagaatacccacctctagacagccactgaagcgaggcatgcatgggaaagggtgtgggggtgtggggtatgcaggagctggtcccgagggtcctgtcagagcctggcccaacagcccggtccggctccagcacctgccacctgtgtgcctcacactggcaggtgtgggcgggaaggatgggtcaccagggacatggcaggatagggtgcaggcaggggcctggaggggaagaacagtgggggagagagtgaggaccagggcacacctctgcctctgaacacaaaaggtgagaggagaaaagcagcccaggacatcctttctctcctccccaaaatccaggggtggccagttcaaccaaaagtcatggccctgctggctgggcagatgccaggtgaggccaacgctgatatgagaggagggaaagctgggagccaccatctgtaagaagctgacttcctccagctaccccaggaggactcccaggccccgggatccaagaacaaaccagacagtgctttgctgctgtctacggctggaactgggctgtgggtgggcctgtccccctggtctcctaggtacacacagcactcggctggggcctggaggaggaaggatgaccccttccagggccctctactctctgccttgaaaaggggtggatgacgggggcagacctccagggtcaggcagatcacaggctgtgctgctggaccagcagggaggtgatggggaggactcaaggaagcctctggggtttctagtgcaagatgagattgcgcaggaaatcagaactcagcagagactcagagcagctcccggggcagggctggcaggaggggctccatcaaggcagctgccttgtggcgctggccggtgtttctgggcagtcacctggcctggtctagctgctcctggatctgtgtgcgctgtgggctgcagcccacttctcctgctttgtgccggccctgatggtggtcccggcatgctctagggagcaggagtggtggaacagctcagcgtgccagccctgggctgagtctcaaccctctgcagccctccacctgtcttcagcctcgctgttcctgtggggggactccaagctctgagcgttcagtcggccagcaccagccccctccctcctggccgctggggagtgtggatgcctgggggctggagggcacagacccctgactgtcctgccaatgcagccagggccccatcctgggtaaggagggacactctgccggtggcccaagaggcagcatgggtaggaaagaggcccatctcccgtcccctgatgctcccataacccagcctgggtggtgccggtgcctgccaggttcctctggcctaaatggatggaatcttttctccctaagccactgctgagctggaagctgcctgttctccaatgctggtcagcgcttcatgagctgtaaaacctcgggcaaccattgcttctttccaagcctcacttcctccatctgcacagtcagagtcttctctacccagagactataaatgtgaaaatgctccctggggccggagagcctagaagattgtaagcatgcaggctgtgcagacgcacaggccccgaggcggtgccatgggccaaaccccttgccctccgaggggtgaaaagccctctctggggaagcctcttcacatcattcaacccagggcaggtgccaggggacccacccctctgaggaccaagaccgtgggatagccacccaggcctagagaaagcaggcagccctggcccaaagggccaagaagcaaaggccaggagccaggggtccagtgcggaaggctgacctcagtaggaccctgaccacgctgctcacccacattcctgtggccaaggccatgacaatgacgagaaggcagcaagggtgcctggccacggagggggaaggcctaggccaccctcggtgagtgtgtgaggggcctgaccaccagcaaggcctgccccggctccgcacgtgctggcatggagcattcgcaggccccttcctgtgtgcacccagtgcctgcaagccaggctggtccgacggagatggggccacgggcaatggggagagccaggctacacgcgccccatccaaagggggcagctgtgcctcggccccagtgagcgctccacgtggggtgtggccaggcacacacagaacttctggtctgtctcgacaagtcaaaaatggggattctctggtgcagctagtttctcattttttggagaaccacgtggtccatgtttagtccatgagctgccgtgcgcaatgattctcagggtactgtgggaggtgagaccggggcccagagatggggcagctgccctgcacagcctgcatccccaggtcgcctgcagccatcacattccacgcaggtgggccttgtctagcctggtgtctgggcagagaaattcgctcccaagtgcagtgggctgtgcctcatcatctagttccagttcttcttctctgaccttttcatttgacagcaggaaggtgcctgtcccaagtccagagatgggcaaagaagctttcttttaaaaaaaaaaaaaatgtgagacggagtctcgctctgttgccccaggctggagtgcactggtgcaacctcggctcactgcaacctccgcctcctgggttcaagcaattctcctgcctcagcctctcgagtagctgggattacaggcgcatgcaccaccatgcccggctaatttttgtatttttagtagagacggagtttcatcatgttggccagggtggtctcgaactcctaacctcaggtgatccacccgcctcggcctcccaaagtgctaggattacaggtgtgagccaccacgcccggcctcaaagaagctttctgacgctgattcaaacctaacctggagagatggtcaggcctgacccctgagggctcccgagccagcatccaccttctgactggacgcttcctggaggagactcctaaaacagccttggctacgtggcagaggctgggatgtgacctggggaccacccaggcattgtcccttgccccccattcacatacccccattcctgaggtcactggggctcctctgctggccagagtctaaacggctgggaggggtagggtggcttgctgtggcaggtggctttgagagctaacccctgagtgctcagacacaaggctcccgcgtggtgagggatgaggtaccaccagtagcggccctcccgctagcccaggggttgtggctccccagtgagagagctgtgcttaccagtgcgagcgcaggaagttcaggagcaggatggtgacgcttagagagtagcaggccaggtagggggatccgaaggccctgctcagcttgcgggtcttgtgttcccatcgtgcaacctaaaccgtgagcagagaacaagaacgagatatttcctggggagactccagggtgggggtggggagcacatgcctctctctgcttcccaggctccaaagcccccatttccaaagaagaagaattacacgggagcaacaaccacatgcaccccagctgcacattatctgccctagagcaagttccacagggattttcacacttgctcagttcatctggacggacaacaaggtccttctggaaacaactcttcaaccagacacagccatgaacccaccaagaggcagaaagagacgtctggtggagaagatctgtccctggggagacacatggggtctgacctcaggccctacctgggagctgctgagtgcatcccacagactctaaaagggccccagcagaactgccagaggagcccatggctgcaggagcacgcggccttcagagcacaggcccaaatttccgctgggggcctcacaaagtgtccatcacaggcgcaaagcaaagcaaagaaaacccctcaccctcctccctctgcccaagtgctcttctcaaggcacagactttcaaacagtgacttttagcctcagaatccttttactttgttttttttcaaactaatcacatctggaatctcaacatctggccaccaacggtggagagaagggagctcttcctgcctgcctgctgtttccacagtcctgagctggttatcgcccgggcctggcccagcacactgaggaaggaacggagaggaggggagggggcaaggaggatgcaaaaagacaagcatgcagcctggggtcaggggctgggctctaggtatgtgagcaagttgtctgtgggcccagagtaggcgcctgtgtgtgcacaggaagagcctcagaggcctgctcccagccacctacctccaccccagccccagcgatgactgctgcctgctccacttcccaagtggacctgcctttcccagcagttgcggcaggagagtgattagcgatgatttcctcaaggccactgactcccagaaggtggctccctagtgagtcctctggcccctgtcctcagagctccttggcagtggcaggctagggggcagcagatggcggggggcagggtatgccaaagtttacaggaaggagaagtgaaggaggtagctcccgggccttcccctcaaccagctgttggcactgcagccaattctcccagaaggtaagcaggccctagtccaggtctcagcaggtggccgctgctgactctgtgggaagctcaaaaggcggaaggaataagcgctgcaggggtgaggagggggctgcggtgaccttgctgggaatgtgtggggtggggtgggggcagaagaggagcagtctgcagagagcaccgcgggggcccaggaccacagcctgctttgttttgttttgttccaattctgagataaaattcaaagtagtttttagctatgcaaccatcaccacggtctaagtccagaacatttcatcaccccaagtagaaaccccgtcctccccatcccccatctgccggcccctggcaaccactcatcgctttccgttgctatggattcacctattctggacgtttcatataaactgaatcacacactacatggtcttttgtgtctggctgctttgactttatgtaacgttctcaaggttcgtctgtgccacagtgcgtaaatgcacttcattccctcttacggctgaatacgactccagtatataaagattttgtccaccggttcagcagctgatggacacttaggttgcgttagcagcactgtccacggtgaccaaggccaaagccaagcaacatacgggcgcttgctaggaacaatcgtgcccaagtgttttgtggatgtgtgttttcagtgctctcaggtatacacctaggagtggaattgctgggtcacatggtaaatctatttattgaagagctgtgaaactgtttgccacagtggctgccccattttccagccccaccagcaatgcatgaagattctagtttctccacatcctccccaacaccagttattttcccttttcaaaaattatagccttcaggggtgggggacactgggcatggtggcttacacctctaatcccagcacttcgggaggctgaggtgagagaattgcttgagcttaggagctcaagaccagcctgggagacatagtgagaccctgtctctccaaaaaaaaaaaaaaataataaaaaaaattaagttagccagaagattgcctgagcctagaaggttgaggatgcagtaagccaagatggcacaccactgtaccccagcctgaagacagagcaagaccctgtctcaaaaacaaagaaaagaaaaaaaattctgtagccatcctagtgggtgtcaggtggctttggtctgcatttccctaatgataaagaaatacctttccagctgggcgtggtggctcacgcctgtaatcccagcactttgggaggccgaggcaggtggatcatgaggtcaagagatccagaccatcctggctaacacggtgaaaccctgtctctattaaaaatacaaaaattagccgggagtggtggtgtgcatctgtagttcagctactcgggaggctgaggcagaagaattgcttgaacctaggaggcggaggttgcagtgagccgagatcgcgccactgcactccagcctggcaacagagcaagactccatctcaaaaaacaaaaacaaaaacaacaaaaacctttccttcaagggttctctctgccatcctcagcctcccatacagcccccctcccccaacagacccaggccacacctgtcccttagcctcggaaagagctgatgctaaatgagctttcagaacaatctaacgacaacagaaaagcatcaagcaagactaacccatgtgggaaagaaaaagaggaaaccacgccttgcctcccagcgaactggtattcgatggggctgttattccgaggcaatcgataaaccagcagccagcaggactcccagaacttccttccctgcctggcagcaccaccgtgtcctcactgggagcccagctgctcgtttcatccaacaatgagcgggtgccggacgcagtcgcctcccagggccatgcatgtgagcccttagtaggcagcggcgtggcccagcactctgctctcactgctcctggtttttgcctgtcttctagatttccagaatcctagagtggggattcatttgcccaacactccgtgaccctggctcaaatttcctctccccggcactgccaggaccctccaggtaaatgtaagcttcagataaacaacaacctggccaggcacagtggctcacgtctgtaatcccagcactttgggaggccgaggtgggaggatcatgaggtcaggagttcgagaccagccaggccaacatggtgaaacctcatctctattaaaaatacaaaaatttagctgggcacagtggtgtgcacctgtagtcccagctactcaggaggctgaggcaggggaaccgcttgaacccgggaggcagaggttgcagtgagctgagatcgtgccactgcactccagcctgggtgacagagcgaaactctgtatcaaacaacaaacaaacaaacaaacaatgttttggtgcaacctgtcccatgggactgcttttaatcctaaaacagtctgtgctgttgacctggaaccctaatgcaaccgggccctgggtgtgtgtttgctccattcagtagcccagcctctcccacaccctggcaaggagttcccagctgagctctggaacacacaggtctcctccccaaatgccggctccttttctttttttgcaaatctcacccacagcctctaccctagggcagaagagacaggcccaaggcaagtggagtgggaggaaaacaggaatggggtcgagacccagggacaccatcctggccttgacattcgccaaaagccgacagcacttcataggcaaatcactcagctgcccgctacctaaactgagtcagctgcaaagtacgaaaaacaggacggacagtaccccccaccccgatccccggccagcgtggaaggaggggtagagcaggtgagggatgaaaggctcctagccctggcatgtggcccaggacatgtgagagcgcccgtctctccccctatccgtggctcagagcagggactgtgtctgatttccttctgggtcccactcagatgggaacggcctctgcccatgcacatgcccgtggtgcccgtctggcctgaggtggcagctccggcctctgtctccacgccaggacccatgcttcttccctgccctttccagggtgctattcttggtgtccttggactcagaggttgtaactggcagcccaagatgtgttctggtcaaactcatagcatgtttaaaatatttggatcaacaattaaacactcagcgtttttcacataaaagccaaggcttctcaaatcttggcaatgaacacagcctcccaccccacaaggcctacaccagcccagctatgcagtaagggcccaagaagcacgacccccttctgggaacaagaccctttcctagagacttcctattggtctctcaaatttcctacgcatccttgaagtgaggccgcagaaagtcgagttttttatttttgtttatgtttttagacggagtttcgctcttgttgcccagcctggagtgcaacggcgcaatctcggctcaccacaacctccgcctcccgggttcaggtgattctcctgcctcagcctcccgagtagctgggattacacgcatgcgccaccatgcccggctaattttgtatttttagtagagacgggatttctccatgttggttaggctggtctcaaactcccgacctcaggtgatccgcccgcctcggcctctcaaagtgctgggattacaggagtgagccactgtgcccggtgagggtagaatttttaaatccctctttgaagtgagacacggctccttcgcactcactgaaggactgatgggcaagtgtccaccccagtgcccagcagggcagctcgtggctcccagcgccaggttctgggctcaaacaccggctcctctacttgcagcttggagcttgggcaggttatttcctttctctctgcctgtttcctgatctgtaaaatggagctaataatactctcgactgcgtcacagagctgctgtgcggattaagcgaattcctgcccatgaaatgcctggaacgatactacaccaggcacatgggcgcatggcggtgctgctgtttgttttgttttggaatgggcaaaagggtgagagtcaagaggctaagtccaagctattggcctgacaggccccggcaaagctgatgaagaaagtctgttgtgaagcagtgtccccagggagaggacaggcagacagacctgtgccacactgggctcgccggctgccaggcctctcccctctgcggccagcccttgatggactctcagaagctcctcctctctcaccttgtccttccctggctaaatctgcctaatacccagctgcagtggtaggtcccatctggattccacagccaggacccccccaccacctggcccagggctcccagcctaggcacctgggggtctagaatgccccaagcaaagggctagtgcttcgcattggtaatgaatgctggggaggagctggtgtttccacgagctttgccaagggcccacggaaccactgaaggagcccatcccttttgtttagaggacgtgggccgtgcgccagcacagaggggctcatgagctccaagcttccttctgccttcctgcttttgcctcccgaaccgcccccatctcgcttctacagctggacccacccctctgcctgcctgactggccccctttccagccccaggagccgcagccagtgccttctcactcctgaactcctgccttgcggctccggcaagatgtggctgtggcctaacagttcacactgtgtccacctctgcctgcactatgctgaatcccacgtggggctaccacccgaggaggcactcaacaagcacgggtctgtgtggaatgatggatacatcagcgctccgaggccttctctcctctcctctttccctcgccttgcagggagccaggaagggagggggccactagctgggctccatgaagagaggaggggccctaaggcccccagggtacctgtaggtgacatacaaatgtctgagtgagacgtccccggggcagcagggagtctgcccatgactcctgtctctccctcatcccaccctggccccccagaacctatgagaggtcagggacctcagaggcggtggagcccagccctccattggccttctgaacagaaactcagggctccactggcatcaggaggtgggattcaggatcccccagtcccactggagttgacaaggatggctgaggctgccaaggctactgggcatcccctaggccggccccgatggcccaggcccagcagcatgaggacagcccatcgaggcatttcctccccagccccagatcaaggtcactgtgataccgtcacataagcttcatgtgcacgccaagtgctgtccacaccgcgcatcccagcggggcctggacccctctcccttctcaccagggctcatagtggatggggtgtgtttgtgggagctcagcagagcccagcacaggacccagtcactgccagctaggcaggccctgggccagcaagcaagtgcatatatgaacaggcggctctccgaggtcgcaccgtgtcagccccctctgctctgcacacgctaggcccagccggcccggtgacctggatcacacctgcccttcccaacacccagttccacctgtcctgccaggtgtgcacagccctggctcctttcagatctgccccaatctggccagtgctgctgaacctgggccagggcctctccaggacataggaccagtggcagctcagggcagcatccaaagcgtcccacagcacatggctcaactgcccttccacgtgacacagcctgctcgagggctccaacagtcattgtctccaacagatcaacagacctgcccactccaccagctagtccagtgaatcaatccctgtccaaggtgcacccaagctctcgccctgcagtgagcacactagtgccagagagcaggtcccagcaccagctgcccacttccagacaacctgcacccgaggccccagcaaagcaacatgacccagcttcacacccgaggggccatggcacagcgggggacactcgcctcccccagcctcagtgctcatgctcaacctcttcactccgttttgctccccgcctcctccattatgacggcccacagagcacaggagaaagagcaataggaacatgggctctgagttcaaattctagctccagcactacctatagcatcgtataaagatggaacccaccccagtgtccactggcagggggaggggctgaatgaactgcgctacagccccaccctggagaagggctccttgtagaaaggaggaagatttctatctattgctatggtgtaagctccaggatatattcattaagtaaaaaagcaagtgcggaaggtgcacccatcctgttgtataaggacatgaagaggggctgggggaagatacacacacagacttgcttacattttcaaaaagcaacaggggaaggacaaacccaaaactgatcaaaattattacctacaggtgagggaggagacatgccagacatttacaaatgtcctttgttgactatggaaccatgtaaatgttttgcataattaagagtaagaacagggcaggcacagtggctcacacctgtaatcccagcactttaggtggccgaggcgggcggatcacctgaggtcaggagttcaagaccagcttgaccaacatggtgaaaccccgtctctacgaaaatacaaaaattagccgggcatgatggcgggtgcctttaatcccagctacttgggaagctgaggtgggagaatcccttgaaccccggaggcggaggttgcagtgagctgagatggcaccattgcactccagcctgggtgacagagagactccgtctccaaaaaaaaagagagagaacaaaggaactactagaaatccaaaaactcaatcaataaacctggtaaaaacacagataagaagtttcaagtgattttgaaatacagtattttgactaatcctccctcctgccgcacagcctgaggacaaaagaaccagaaagattctagactgcatcgagtaaatctattgttggtgataaaatatttaataatacagatattattattattttgactatatacacattaattatgttactgtatttaggatccaagcttcctataaaagtggtacaaaaatgaaattgaaaggttgaacaaaaacttttgaagtggaaatattggtatgaattcatgatttatttctatttctaaaaaattcatttttccattacaaaaaattggccgggcgtaacggcaggtgcctgcaatcccagctactcgggaggctgaggcaggagaattgcttgaacccaggaggcggaggttgcagtgagccgagatggtgccactgcattccagcctgggcgacagagtgagactccgtctcaaaaaaaaaaaaaaaaaaatcatttttcctagagaggcctggaacagtgagcaccctagcattcaaactgtggtctccaaatatcattttccactaaaaataaccagagctccttggttaaaaggccgattccagtctactctgggaacagaagatgttgaacctgagactgaaagctatgaaagacgaggtggaaacgccagaagaacactaagaaacacttgaagggtccccagctggctaaaggcagacatgctgaggttgctaggacactaacgcattattctgaaatggttttttttttcttttttatgagacatggtctcagtctgtctcagtaggatttgtctttattcacagacaacaataatcatctatgtcaaaaatcagatggaaaccacaaatagatggatatgaaaatacaaaaaacttagaatactcaagacaactctgaaataaaaggacaaagtggaactaacacaaccagattttgagatgtctgacaaagtgctaaggcaattcagtggagaaaggacagcctttccacagatgccactggaacaattggctatcatatgcaaaaaaaaaaaaaaaaaaaaaaaaagaacttcaatccataactcagaaaaaatataaaaatgaattcaagatggactataaatagaaatataaacctaaatctatatataaatatatcaatctaaatatataaagccttctaaaacttttagaagaaaatagactagagagaatctttatgatcttggattatatgatgatttcttaggcacaatatgaaaagcatgattcataaaagaaaacgtgataacttgaaattcaccaaacttttaaagcttcttctcttcaaaagacattcttgatagaatgaaaggatcagccatagactggcagaaaatattggcaaagcacatacttcttgagggacttatatcaaaaatatatacagaactcttagaacttgataataagaaaacaaaaaactcaatttttttcaatgggcagaaaaacccaaagctaacatcatacttaatggtgaaagactggatgccttccccctaaactcagcaacaagacaatgaaaggacgttcactcttaccactgcaattcaactttgtactagaggttttagccagggcaattggacaagaaaatcaaataaaggcattcagattgaaaagaaatatgtaaaactaactctatccacagatgacataatctcatacattaaaaatcctaaggaatccactaaaaaaatttcaagctaataaatgagtttagcaaggccacaagatacgattgtatttctacacatttgcaataaaaagtctgaaagcaggaatcaaaaaaacaattccatttactatagcaattaaaggagtaaaatacttaagaataaatataacaaaagtacaaaacttactctctgaaaatgaaacattgttcaaagaaacaaaagatctaaataaatggacagacatcccatgttcatggattacagactggataagatggcaatactctccaaactgatctagagattcaatgcagtcacaatcagaatctcagctggcttctttgtaaaactgacaagctgattctaacatccatatggatatttaagggtcacaaaatatccaaaacaatctttttttaaaaaaagacaaaaaacaaaaaacaaaaaggccaggctcagtggctcatgcctataatcccagcactttgggaggccaaggcaggcatatcacctgagaccaggagttcaagaccagcctggccaacatggcgaaacctgtctctactgaaaatacaaaaattagctgggagtggtggtgggcatacgtaatcccagctactcgtaaggctgaggcaggagaatcgcttgaactcgggaggcagaggttgcagtgagccgagatcgtgctatcgcactccagcctgggtgacagagtgaggctccatctcaaaaaaacacaaaaaaacaaaaaaccaaagttggaggactcacttcctgatttcaaacttaccacaatgcaacagtaatcaagacagtgtggcactgacatagggatagacatagaccaatggaatagcatacagagcccagaaataaacttccacatacatggcaagtgatttccaacaaggctgccaaaacaaatgaatgtggaaagaatagccttttcaacaaatagcacaaggacaacaggatattcacatgcaaaagaatgaaggtggactctcagcctcacatcatatacaaaaactaactcgaaatggatcaaagacctaaatgtaagagctaaaactataaaactcttagaagaaaacataggtataaatcttcatgaccctggatttagcaatggtttctcagatgcaacaccaaaagcacaagcaatgaaagaaaaataaactggctttatcaaatatttagacttttatacttcaaatgattctatcatgaaaatacaaagacaacccacagaatgggtgaacatatttgtaaattatttatctgataaaggattgtatctagaatacataaagaattcttacaaaatggctaaaagtaaagagggttggagagaagcagagcaattagaatgctcactccttgctagaatgcaaaatggcacaatcacttctgaaggcagttcggcagtgtctctcttttttttttttttgagacagagtcttgctctgttgcccaggctggagtgcagtggtgcgatctcggctcactgcaacctccgtctcccaagttctagcaattctcctgcctcagcctcccaagtagctgggattacaggtgcatgccacgacacccggctaatttttgtatttttagtagagataggggtttcaacatgttggctaggctggtcttgaactcctgacctcaggtgatccactcacctcggcctcgcaagggattacagacatgagccactgcatccagcccagtttggcagtctcttgaagtgttatgcacacacctaccaccacatgacccagccattccactcctagtatttacttaagaaagatgaaagcagctatccaggcagacttgaacatggatgtttacagtagctttacttgtaatagtcaaaacctggagacaatccaaatgtccatcaaccagtgaataagtaaacaaactacggtgaatggatacaatggaatactactcagcactaaaaaggaactaccagtccatgcaagagcatccatcacccacaaaataactatgctgagtgaaagaagccagacaaacatagagtatactgtatgattccattttcataaaattcctgaaaatgcaaactaatgtccagtgacagaaagcagatcagcagcagcctgggttagaaagggcaagaggggctggggggatctcaaaggtgggaatggatatgttcacagtcttaacctgagtacgtgcctcctggctgtagaaacacatcaaaactcaaattgtaggcagggcacagcggctcttgcctgtaatcccaacactctgggactttgggaggccaaggcaggaggattgcttgaacccaggagtttgagacaagattgggccagatggtgagacccccatctctacaaaaataaaaacattagccagtgcagtggcacatgcctgtagccccagctactctggaagctgaggtgggaggatcacttgagcccaggagttcaatgctgcagcacgaatgcactccagcctgggcgacagagcaagaccccatctctaaaaaaggcaactcaaattgtatgcttcatataggtgcactttgttgtaagttggttattcctctataaggctattttattttattttattttattttattttattttattttttgagatggagtctcgctctgtcacccaggctggcacagtctcagctcactacaacctctgcctcccggattcaagcaattctcctgcctcagcctccagagtagctgcgattacaggtgtgcgcccctatgcctggttaatttttgtatttttagtagagaggggtttcaccatgttggccaggctggtctcaaacttctgacctcaggtgattcactagccttggcttctcaaagtgctgggattacaggctgaaccaccacgtctggcctgtaaggctattttaaaatgaaattattaattttgctgaatgtttaatgtattatattattaaaagtccttacttatggccaggcatagtggctcacatctgtaattccagcactttgggaggccgaggcgggtggatcacgaggttgggagatcaagaccatcctggccaacgtggcgaaaccccgtctctactaaaaatacaaaaattggccaagcatggtggcatgtgcctgtaatcctagctactcaggaggctgaggcaggagaatggcttgaacccaggagacgaggttacagtgagctgagatcgcgccactgcactccagcctgggcgacagactgagactccgtctcaagaaaaaaaaaaaaaaagtccttacttgttagagatacattctgcatttcatatgcatgtgagatatttactgatgaaatttgatgtctggatttgctttaaaacactctagtgaaaggaagcagacaggagtgaaggggaagaggcggagagggggcagaagacagatgaaacaagaatgacatattgtgagagaattcttgaagctgggcattgggtacggtggtgcaggggtcattaaacggttctagtttagtgtatgttgcatatttttgaaaataaaaagttagaaggcaaatccaggcttcactgtttcccagctgtgtgagctcaggcaggtccccaacttccctaagggtgacagtccccatcggtgagcaggggatgcccctgccctcccttgggttctgtgagggccttggtccagtgtctggcaacgactcccttattctgccactgtctccccaagggcctacaatctccttaactgtggcatgcaggccctgtgccactgcactgactgtggcatgcaggctctgatgacacccacagcacagtgacgtcagccgacactggcacagggcctgctgcacaccaggcgctggggtgagtgcagccatgtatcctattcaatctgcatgccagccccacgggggacgtccgatagtgtgcctcccttgcaggacttgccaaggacacacagtgagtaaatggattgtaactcaggtctggcttcagttatgacccctgccacatgctgttcctgaacattctggggcctcccaactctgatgggggaatctgtgccaatctgacttcacgggaccatctcccctcactcagaccccagcctctgtccttggcttcacccaacaagctcaggccaagttcaaaggcctcctctgtctgcctccgggtccgaagcacaaccaggcagtccccaaccttcctcctgcacacgggagccccagggttgcttgttacctctatcaagaactcagcagccccgcaaggaacagaccagcaaaggtgacctcatgggagtgtccatgccctggctggctcctgtgggtttgagcagagggaaatggtacagagctgtcccttcctcacccagtgggaaagtcaatggtgttcctctcatgagggcctgctacacctgcccgtccaccaggtgcgactcatgctctgtgctccctgcatccactgaaatggtccattggccccgtgggacctggtatggccgggagcaggatgaggctggcctggcagtgtcagcccctactcagggcggctctggttcatggtgctgtcgggtctggcccagtctgagtggaaggcaagaggctcacagcccgaaacccttcaccagtgccagcacccagcccgggaagtcagggagtgcggggtctccctcagcaggtaagacggcctcagctgcccttacaggccggggggcacgggagggacagggtgtctgctacgtgctccactgacgggtcccactggagatttcaggctggacgatgacaatacattttgctccttttccctgtctgtctgagggtctctgagccctgcttacacagatggctctgtcctgaatgtggggctgctgctgccctggaaagaaggagggagccagcatgctcagagtccagctcggaggtgggagcccagagctcctcgaatcctgccctgctcctgtgaggaggacccacctgctcctgggcctggccccctttgccttccccttgccctgctactaagaaccccccaccggccagagggcagatgctgtccctgcaggttcccaacccctgccctccatgggtgactgtggtccagcgacagcagaggccagctccagcccaacacaccgggctcccccaagcctagcccagcccagcccaggaccctgagccatccccgtgcccagcagcctgcaggggccttccccatgctggcccaggcctcaggcgagatcccctgtgtgtgtgccactcagctgctgattagtcatgctctgcacgtggccacctcttccatccctgatacttgtcttctgggagaaagcaggaggagagataagatagagtgggagaaagagaaggaaaggcccggaccactctttgctcctggaagctctggccctgagactgggagagacagacaagccttccagcagtatgacctgtgcctagatttcccggggagggagatttgagacatggacagtgcctgctgcagggcccagcatggcgtagaaggcaggtgtctttccttcccgccactcagccttccaggaggatgtttgttgacttggaagacagtcacacagttgtgacttgggtgggacctcatcctcacgtccaacctgccacctccagggaagatcagggcagaaatcaccagggagtggtcagctggcaaacgccctcctcaggaagggacagctgctgccgggacccatggcatgcccgtccttgctgtctgaggtggtctctccaacgctgcaacagggggccagtcaggggcctgggtcccagccctcccagccctcagtgacctgcaggccccacgatggtagagggagggtgctaaagagctgggtacctgagcccaactggacagggaggcagggaggtcactccatcaatacacgctgagcggcttctccaaagacgatggccaccagcggcaaagagagcctcaggccaggacagaggcagtattgtgccattgctgtcacagctctcacttaaataaaatatatatctaaaaatttgcctcaggctgggcaacaaattgagaccctatctctacaaacaattgaaaaattctctgggcatggtggcacatgcctgtagtcccagctacttgagaggctgaggcaggaggatcacttgagcccaggaatttgaggctgcagtgagcttggattacaccattgcattccagcctgggtggcagaacaagactctgtctccaaaaaaagaaaaaaaaaattaataaatacattaaaggggaagaggcagttgtttcatcagaagattcgctgagtcatttaaatagggaggctttctactgcatttatgatgtctgatttatgcgcagctttttaaagtgtcttttctttttacataaaacaaacccacctgtacaaagcaactgaaaaagtagcttaggagtgactccaactattaaccaaatatagcacaaagcgtgatccgccttcttgggtcaatatttacctggacttcagcctgcctcggaaaggaaatttgaaaatatttggcgagtggcagaatggttgtctggctacacaggccgataagcagctggggctcaggtttccaagctggccttttatgggcgagagacattatcaccatcatcaacgcccatgtgctagtagtaggacccactgtcagccagctttttgttttgtttttgtttcttaaagattagtatattttagaaggggggactttaaaaatcatttttaggtcagatttatgaaggtaacacataaagtaaaatgtaccctttttaatgcacaggtctgtgagttttgttgttgttgtttgattttagtaaagatggggtctcgctatgttgcccaggctggtctccaactgttggtcttaagcaatcctcctgccttggcctcccaaaatgctggggttacagctgtaagccactgtgccccaaccaggtctatgagtcttgacaaatgcataccaccaccacatcaggacacagcacttccagccagctccaggctccaacccagagctgggcccttccctgtcccaccccagacactcctgtcctgtgttccatcccgtttccctcctcaagtgtcacagaaatggaatcgcgcaggctgtggcatcctgcacttggtatgatgcctctgcgatgcgcccagggtgtcacatgtatccccagcttgttcctttttgtggctacgcaggattctttggtgtggacgtgccacagtccgtgtgtccctgccccagctgagggactgctcgtgggattttgctactgtgtaactgtgtattttcatttctctgagggccaatgtgctgtcagctaatcacgatcatggggcctgaatcagctcacaaggtcactgtgcaggggaaccattgccctcattcaggggcacagagccccgggcacagccctgcagctgagaagtatcaaggcatccggcctgtgggactccacccctgtatcaccaccctctgtctgccgcagcccctgtgccccacccatgcactggcgcctgaatctctcaggagcgtgggcaggaggggtcctgggaggctggtgcaggaaagactgaccacgcaggtggcagggagctcacagcctccacgcaggaggctcgggagcaggagggcccaccccaggagtgcagggacaggggaggacaaggaacaaaggctgggggcatggaaggacagagacatcttctggaaaagacagaatctgagttgaacctggaagcaacgccccaagggaaggggccaaaatgggcagcagccagccctggccgtgggtggggatggggcaggggcgcaggatggagggtggggcctggagggctcatggaggaaggaagaagagcctcagaggggccttccaatcccagctccaaccctccctcccccgacagaagacccccaacatggggcaatggccgggacgaggagggggctgccccaggtggactctgcgctctatcccagtgcctcctctgcgcctgctttgcccagagcacacaggtgaaagcaccaacttcgggctgagcacagcacacgtgagggagggtggccagccagcatgagttctggcattatgtcccagggggtcaggggaactgagccccaggaagactccctaggcaggtggcagcagccactgtgcaaggagaggagccagtgagtcaggagcaccagctggcctccaccagccagacccccagaacccgcgtctacttgaggacactgtcagaaggagcccaacttccaggcagctgcaggatgagaggccccaggcaggctccgcccctccccatgctgcccctctccaacagggtccccgcagcacagcccacttctccaggcaggctcagggttcagagggtcgtgcagcatgcagcctccttctcaccctctcctgcagtgaccccctcgctcccccaccttggacagcacctggcacagtgcccactcatcactggcgagtgaatgggctcccgagtgctcccctgtgagcacctcaaggcatacaacaggtactcagtaaatgttcgctgattataaatctgcagtgggcagggagtgtctccactgcctggtatttgtctattctcttcttgctttctgtgggcactgacagcagtgactgccagtttcagtgccagccccgtgctgagtccagccaccctggccgctgagtgctcggctgagacggggacagagccaccactgggattctggggtcacagatgcatctgcatgtttattccaacagacaggattgttgctgacgttagcagaattgtgctccgcctgctgctatatagagcacccatatgaggtaggcgccaggcccaagactgggcattacagaagcaccccatcctcccagagccctgcaaggaagatgtctccctcacgcacggacaggtgcggtggtgcctcaaagtttcccgagtcagctgaaccacctgatcccgagccccagctctttcagctcctccagctctacacattcctaaaacccaggctgcccaccaaacaggaagcagggagcatcgtggaccgtggcccgcagcacctgtccccacttagctcccaggagagaaggctggcaggcagccccaagaccaccggccgcagcagcagcggggcatgggcaggctcggacatggcgggcctcatcccaaggcgccagttccctgggcccagctccagcgagccagagcccacacactgaacttgaaacatctgcccagacctgggactgctgcagggcctaaagcagcggtgagcacaggtttgttgaggcttctggggataaatattttgatatctgtgctccaggaaaggattctgagcttcagagatgaagcaacctgcccaagaaggctcctcagcgaccggggcctgcccagggtgtctgcagccagcacagctgtggcctgggctgccaaggcagaaacgtttcctcatgagccccttgcccagagagaaacggctgctacccctggccccaaggctaaaacgacaggccacagacatgtgagcccaacacccagggctcatctgcctggtactggcccctgaatatcagtgcctgagccagaagggcacagcccaccttcctcttttttcttttttctttttctttttttgagatgcagtcttgctctgttgctcaggctggagtgcagcagcatgatctctgctcactgaaacctccacctaccaggttcaagcaattctcctgcctcagcctcccaagtagctgggattacaggtgctcaccaccacacccagctaatttttgtatttttagtagagacgggatttcaccatgttggccaggctggtctcaaactcctgacctcaggtgatctacccgcctcagcctcccaaagagctgggattacaggcgtgagccactacgcctggcccaccttgttcttctttaaggcaaacaccgtgccaagcaacctggtttgcctgattgagctcccgctcagttaatccagaaacaggggcctacgtggcctctggggactggcttgggatagagggtgcttgctcaggtcaccccagatgagccttctccatatcctcagctcaccacgggctcctgggattacctcccgccacctccaactaccctcctggctaacgctttcctctcaggccatggggagagcaggctgaaccatgccaaggacacaaacagattgagggcagggccttcgtgttttggtgggattgtctttcatggaggaaaaacaggggaatgggttatgccctccagtaatgacagtgaccacaatcctggtgtttctagaatctttcagtttcagggcttttccacatgcacaagtccatgagatcctcgcctgggctctgtgaagtagccaggattatacatgtgatcccatctcacagatgagcaaacccaggttgagggcagcctgcagggactgggccgccccctcctttgcaccgttcggccaccgttgcaggagcagggcccaaggctgcagggagtaccccaggggatgggcagtgaagctgccgttcctgcacactgccgggtctagaggactctgaggctggaaggggcatggggacatcattcttctcctctccagctgccttcccccagagcatggcctcctcgcatcagttacttaaatcagttacttaaacccagtgtggttcccagaccagcagcaccaccggggaagcatgtcagaatgcagactctcaggccctggcccgggccactcggccacattctgcatctgcttccgatccccaggactgtggagaagccacgtcgtgtcctacagagtcctgagggcctcgcatgtgcatgtgaccactgaccgtccactgccagggcgttcttcccaagtgcgaccatggggactctgctgagcactccacactgtcctttccttcgtctgccttcctcaggcatacggcagtgaatcctgcagaagtctcaacaggctcagtaccaggacccagcccttcaccacattcagtggcccttccaagcatgtggccccagaccaggagctcctgcggcactgggaaggtggctgccctttgaaggggccacggaaggcagcgcacgccacctggatcccgggccctctgcctgaagcacagctgcagtgactttcatgaaggcatgaaatgctctcacgacaaagggcaaaatccagcttgtgctttttttttttaagatggagttttgctcttgttaccccaggtggagggcaggggcacgatctcggctcactgcaaacttcgcctcccaggttcaagtgattctcctgcctcagcctcctgagtagctgggattataggcatgcaccaccacatccagctaatttttgtattttcagcagggacagggtttcaccatgttggccaggctggtcttgaactgctgacctcaggtgacctgcttgcctcagcctcccagagtgttgggattacgggcgtgagccacggcgcccagccagctcatgccttttttgacccaaaatagaacctctgagcttgaccatgcatacaatttgctagatgactgtcagtgacttgcctccatgtgggaggagagaactccaaggctgaggtcccatttcgaggcatctgagaacacagccttgctagacgtcttaatgcctcctataggactggcagcttagagggcagacgtggtcggtgaggggggcactggacgggggtcaggaaagttgagcacctagtgcatgcagaacacatcctgtggattattacagaatcctcctgacaatccacgaggaaagaactttattttatataaggaaacaagaacatggaggcacccagacagtgagtaactggcccaaagccacacagctgggaagcaggaagcccagcttgtgtttctttttcttttcttttttttttttttagacggagttttgctcttgtcgcccaggctggagtgcaatggtgtgatctcggctcactgcaacctccacctcccgggttcaagcgattctcctgcctcagcctcccgagtagctgggattacaggtgcccaccaccacgcccagctaattttcgtatttgtagtagagacagggtttcaccatgttggccaggctggtcttgaactcctgacctcaggcatcccaaagtgcagggattacaggcaggagccaccgcatccggcctccagcttgtgtttctaaccatgaagtccccccactgccccgattcactgcacagaccacagccttggtgtcctcaagtgtgacgggcaggggctggcacaggtgctcatgaacatctgaaccagctctggcttcctttagtcctccgaacagaaaagacgtttcaaaatggaggcagaacagggcggctttctccacttcccaaccagcagacacgggtccaagagaatcttccctgctgaaccaggaccatcatccatgtgtgaaattgggggcagaaaggcgggcattttagccaccaaactccagtttggagactgaccccagctgcagcattcttaccaagggacctggacatgttattttggaaggaaggagaaaggaggcgaacaggccagccgttctctccagagggagtccaaggtgggcccgggcccgggttaacttggacaaggcacttcctgttccaaagggccactcagcttcccgtgcaggcggccaccaaggagctgtctggcctcacatccctcagggtccttgccgggccacaccctatttaaaacctgacctctcagggcagtctaggaatcatggcgtgttgagcggggcagccgggacctcagttgtcctgttctagagcattctgatggacctcacccgcccatgcaggtcacctgtataaggacaaaggacaaacacaccttgaagcccctcaccgtcctggcgtcccagcccacctctcacccaggtctgtccagggtgtgcccggaggtcacatgccccatggtctccagcacgttgcatgctcctcacagtgttcctgccacctggaggagcccattgcctgcctacattacaggtgctgtcaggccatgctgaagatcctcctcttgtggccgccgtccccacaagtcccagccccagggccattcctatgggcccactggagaagccacagcccatgccaccaggctgggctccttgtcctgcatgctgagtcttggcttcaactcctacaccagagacggcctcctctgctctttctgcggggccgggtccagcccatgactcattcattcatgccattccagaacaaaccctacttttgcctgcttccaaacttttgctcaaaatgttctcttttgtgataatgaagttgtgctgaggtaggaaatgtcctccgttttagagatgctatgatggagtgcagagggacaggtcacagcgttcgtgacgtcagctaccaaggcaggatgtactggaatctaagggctgatgtttggaggttcgtcctctctacttttctgtatgcttaaaatttgtcaatttaaaaaagtaccgctctgcctgaaaaaccaattcctttccttgcctgtctcttcctgctaaaatctctttccttctggaaggaggccacgactgaccttccatcttctgtccctgggccaccttgcctgggctcactcccagcacagcatctgctgagccctgaagcctcttctgtacccatcttatgtcctcaagcagcctataaacttgccaggtggggccgagcctccccacacctccctggggcgatgcacagacgctctggctggatccagtggcctgggctagaaggcggtgtcacctgaggccaatgaagccatcactaacaggagaagaaaggagatgatggcacctgtggagaagggcatgtgtgggccacggcatgtcctgatgcctgctggacaccactgcccctgggtttggccgggctttgctctcccgtgtcttggtggctagccaggcagccctgaacccaccaggcagaatcaaatggcctgagcccctcccaggagcagcagggctttctccaccacattttcagaagcaggcttggttcaaactggtgccaggctggtggggggtgcagtgggcatgatcaggtttaagtgactctcattgtttctgacatttgctaataaggctgataaggccccgggaagaaaattacaagataacgggatggcatcagctgggctaggaagagtggcctggccacctgccacccatccagcccccaggcctctgctcacaggcgcctgccttcgtccgaccctggggagcctccctgtccaccctggggctggcctagcctatggccaaagagaggctgggacaaggtggggcattagtagcccaacagggcttgcaatttggaagcaggccaggaaatcccaaatagctctcgaccattgctgagtttagatgacaaccaaggctgcctcattatcttcacagctgcagtcaaagcaaagttggttcatttgctacgtgctgaccctctccatttaaaggacagaaaagaaagaggtggccgtggctggacctctgcatgcactggtgactgcaggatgaagctgcccatcgtcagaagagctccagggggcctgcgcccccgaagagctgggctgcccactggtctccagctccaggcgtgctctcgagccacatgctccgcctggggggcacccaatgttccctattagcagctccgctgttactgcaggataattaattcaatcagaaataattgaacaggcaaggagctccgaggtgctatttctcacctgctgaggcagagagaaatatttgcaaaccagccccaactgcaagcaaatgccagccatagtcctcccaaagtgcagagctcccgacccctctccacacacagatctgttcttcaggtagctatggagggctgccaagtgccaggccctggggcactagggcaagcaggcgaggcgttcagggcctctgcccaagggggcctcctgtctgtgccgcatggactctgtgtgatgatgccagagatgcgctcgccaaagaacagggtgctgggagaaagaataacctggagcgagggcagtcagggaggtgaccttcacactgtggcgtgcaggatgaaaagcagacaccacacagaacacagaaagaagggccttccaggcagagaagcattgtgtgcaaaagtcccaagttcagcctggcttatctcctgcatggctcccccagccctgcctgtgtgtctggaaagcctccctcctcttcctcctcctcctcctcctcatcctcctcgtcctcctcctcctgtctggggcacagccacagggccctaccctgtgcatctccttcctcatgctcaaggacagaactcccaggacctccaagcgcccgtgaactgaaagcaggtttatctcggacttggtatttaagtgtaaggtgtctgcatgacaggagccagaacacgctagtgaggggcatggaaaatctaaatcacaactgaattctgtgggaaatgtgaagatggagaagccagaaggaaggagctaaagagcaagaagaaaattggaaaacacagagaacgtcatcaaatcagagccagtgcgcaggccaccccaaagaaatctgatggcagccactctgctgcacgcacagcagcgggatgttctatccgaacctccccccacctcccgggatacccattaggttccagcctccctcgaggggaaggaatgacttcctttggtcctcaagaacactttgaggtagctattgtcatggcggcagtccacagatgggagctccaaagctggccaagctgcacacagccctgctggcgtccagcctggctctaggtgaggccaaagcttgaatgccctgggctgggtaggctgggccaagccgtgctgcccctgagggctgaccatccagtggggagggacagcgtgtatacaacatgccattctagaatggtccctgggctcctaggggtcttctggagaccaggggtctgggggaggaagagggattccaaagctctaggctgcactggagatcatgtcacctgggcccttgagggacccagaagctcctcgaggcatcagaacatcaagtctgtggctaaattcataccagagtctgtgacggcttcacggtgagcacaggtcttttttttttgagacgcagtttcgctcttgttgcccaggctggagtgcaatggcacgatctcggctcaccgcaacctctgcctcccaggttcaagcaattctcctgcctcagcctcctgagtagctgggattacaggcatgcaccaccacgcctggctaagtttgcatttttagtagagatggggtttctccatgttgaggctggtcttgaactcctgacctcaggtgatccgcccgcctcggcctcccaaagtgctgggattacaggcgtgagccgccgagtccggccgagtacaggtcttgaaggacaggaggtagagcctgtctgggcagtgtgtggagggtggcaagtgtccacactaggtggtgtgtgtccagaaggcacagtgaccaggccacatctcctcagcaggaccctgaccaggctgtgagaccaaccctctgcagtgacaagcagccatggaattctttttttttttgagacaaggtaacccagattggagtacagtggcacaatcacagctcactgcagccttgacctccctgggctcagatgatcctcccacctcagactcccaaatagctgggactacaggcatgtgccaccatgccctttttaacaaaatttttatttatttatttgtttatttttgagacggagtctcactctgtcgcccaggctggagtgcagtggcacaatcttggctcactgcaacctccgcctcccgggttcacgtgattcttctgcctcagcctcctgagtagctgggactacaggcacatgccaccacacctggctaatttttgtatttttagtagagatggggtttcaccatattggccagactggtctcaaactcctgacctcgtgatccacccgcctcagcctcccaaagtgctgggatcacaggtgtgacttttatatttttttgtagagatggggtcttgctatgttgcccaggctgcttccaaactcctgtgcccaagcaatccacctgcctcactcaacctcacaaaatgctgggattacagtcatgggccactgtgcccagccaaccgtggcattttttaccttttattttagaacacttttagattttcaggaaagttgcaaaaacagcacagggcaggcctgtgtgtctccactcagctccctgaggctaatacctcacaaagccacaggccacttatgataaccatagctgtgacaatctgtccatcctcttgggcaaaagcagtgcttttcaggcgggtctggggctgccacagcttttcagcccagcagacgggaggcacgtcctcgtctgggccactctgtacctgcacacacattcagtccctgcaagtccgcagcttccagaggccatgccaacagggggtgggcagcgtgggcgcagggagggagcacacgctgctcaacagcagggaggagcatgaaaggcagggtgctgacggaaatggatccttcttcacagggtggtgagactgtccctgaaaacagttcctccctgatagcgggggggatcagcagggctgggcacagagactctctctcctcgccagtacagcctggattgaaaataccatgttctgtgctcactgtgctccccaccacccccctctggaacgtgtcccgtgaccctctgaggacacagacgttcgtggttctctgtcacccaaagggagggacaggacagaacagcacaatctctgcctgttccagggcctgctgccgctcggtttctctggggacgatcttcacagcttttctgtgccaccgattaggtcgaatttgaaacaagagtccatttgagctttgcagatgcacagctgggacggaatttggggtcccctgtggcacttgggtgtcaaggggtgtgtgcacaagccacacctgaacggtctgcttcaggaccccccttccccccactccccgcagctatcgagggtatgccacagcacctcctaccaccacacagttcaaaaccaaacaagaacagaagtgtcgggctcaggctgcattcggatcccatcatttattgtcatgcatttgtgtgattgttgtagacttcaacagtttttagttgacaattacttgtattcattcattttccagcccgcttattctagttcaaggtcgcaggtggctagagcctctcccagggcacaaagcctggacaggacgccgttccatcacaggacacactcgcacccacacctggtcagactgggaccacttagatgtccagttcactgaatgtgcacatctcggagatgtgaaagaaagcagagtacagagaaagcccacggagtcgtgagagcacacaaactccacacaggcagtgggtgcagaagggaatcaactttttatcatcaacgttgtaactaaaggacgttattccagaccctgctgcagatcttgcatgtacctgcccacgtgtgcagattggtggtatcaggtggtttaatttagcactgtgcatagtaggaaaagttggaaataaaccaaatgaccatcagtgggagaacgggtgcaaaggtcagcacctgggaaatgctaataaacgttaattactgttgttattatgggaccgtaatcctcgactgttgatgaaggaaatgatgttgaacgccatgcagaaggctgcagagaacatctcaggaagggacccaagacaccggaaaggggttcaggggaaagggattcaaggggcacattgtcactatctgcctttttgtgctgttggaattttcatcacgcatcagtgttaactgcttaaaattttaaaattttgaacataataactgcagactaaacctgtcccagaggcaaggggcagagggccacacacggtggtgagctggagctgacaggcgcctctgaggcccagcagggtggagaagctggcgcgggcttgcaggcctccacagcagcccagcccagtccctgatgagaagacaagctggcgtgggagtggtcgggcctgtctggggctgagatgctttcactctacgtaggattccaactggcctgtcacaggatgccccgaacagcagataagcagcagcaaaacaggaggggcacgggacaggcaccaggcaccataagcagcaatgtgacactggaaggaggggccagaaacactgaacaaggagagtcctgaaaaagtgtagcaccctcggccaccagcgcagggcatgagggccgtgtgtcccagctctggtgagctgctggtcagcgacccctcgtcaccatgacacggttggatggaggagggcagggaacctacctgagactgagacggacggttaattttttaaagagacgatacaaaaaaacttcaggcatttaaagttccactgaaggctgggcgcattggctcatgcctgtaatccttgcactttgggaggccgaggcgggcagatcacctaggtcaggggttcgagaccagcctggccaacatggcgaaaccccgtctctactaaaaatacaaaaattagtcaggcacggtggtgcgtgcctgtaatcccagctacttggtaggctgaggcaggagaatcacttgaacctgggaggtggaggttgtctctacaaaaaatacaaaaattagccgggcatggtagcgcatacctgtaatcccagctactagggaggctgaggcaggagaattgcttgaacccaggaggcggaggtggcagtgagccgagatctcaccactgcactccagcctgggcgacagagggagactctgactcaaaaaaaaaaaagtttcactgaatactggagaattctctgatgcaaaatgggttcctcccgagggtcctgggtaaatgggtatttcatctgccatttgggattctcatgtctaataagggccttgcctgaaacggccaccaccgtccctcccatccctgacccggtgctgatccccgtgaggagacacctctgtgggtgagacgctgctcctcacccgcggcgcacccaagccccatcagggcggtggggagtccacccccattcccggttggggggtgtgggtgccacggagacctgcaggctgcagaaatgcggccacggtggccctgcgtggagatgcccctctcatggaaatgtgcttgatccataattaacaagggggcaaggccatgctgtcgttttcttttttaatcactctgctgtcgtttcgacatggagacccaagatctaaaattaggccactggatcccgcacctgactttctgagctccccagggcaggggcgtgtctcagcgctgacagtgaagaggtgtcaaatctgtgctcagggaacaaccttttctgaacacactgctccctgcatccctcatcccttgccccctttcccccaggccaggagccttggctggagggcggcccagcgccccgtgagtccactctcctctgtagagtcccaacccctcactggcctcccagaaaccccaatcgcaaccttttcttcatggaaaccagcatgcaggtttccatttaggtgtgaaggtgcctggccggctgggggattaggaaggctttgctgtccccacacacggtgtcctcagggacctgtatccatggccaggaagaagttaatgtcactgccttcctctattcaggccccaaagtttggggcagggacaaagaacaaggtgtcagggccccaccccaccctccaggaggggtgatctggcagctgggtggggaaggcgtcccacctcaccgtcctggctcagggcagtgtccgcccagaacttggctgcggggatgcagggcgcctgcacacttcggactttccctgtcctccctgtaactatccctgtcttctgtggaggctgtgagaagccgacaagagatggaaagagcgtaggcaaccacacacacaggcccttaccagcggccacccgggtctgcttgtggtgccactgtcccagaatgacccctcacatgaaattgtgctccagcccctcactctggatccccccaactctgcactttttaagcccacagtggctcacaagcccacgatgggcccgcgtccacccaatggccagcactaacctgacccagcaccccctgctcagttcagctcccacgcgtggccttctcgcaggacagccacgtccagcaccttcagcaggttctccccggcagcacttggcagtcagatgtggccagacggtcccttccaggtctgtaccctacgtggaaagctgagccaaatctagaaacttctctggacaactctcctcagttccctactatgtcctctgcctgtcctgaaagctgccatgtccctgccacgacaggagaggagccgcacttgggggaaccactcgccctccctccccgctgcccggcagtcacagccctcccacccagagcacacccagccaggggtggggtggggggctcctctgggcaggagggtctggaggcttctgcgggaggaggcactggacctgagacctggcccgtgagcaggaactggctgtgaaggccagcagaggccaggctcggggcctggtagccgggatcctgcagccaacagcaaccctttcagcacctgctccgttctgtcctcttgtctgtttctctcacagacataccttgtgcagagaaggtgtttggttttcagtacaaagaagacagcgttagagacccggccccctcccctcagccacaaggcagtgggaggctggcctctgtccctcggtaaacaagggtgcagttcctgacaatccatgaagagaagatgctgccccagatgttcacagcccccctcccatgtcctactctagagagagctgtcgtggccccaaaggcatgaacgtggccctccgtgcacggcaagcagtacaggaacgtgttcggaaggcagagtgcgcggccaacagcgtgggcagcttgcctccctgctctggctgcttttaagccagcaaacgtgagctgcgagcggcacaggctgaggcaacggagccgcttccctgcaaggtttcatcagtgacggccagagtgaattcagcagatttttaaaatttttattatttttatttttaattttttgagacagagtgtctcgctctgtctcccaggctggagtgtagtgacaggatcttggctcactacaacctctgcctcccggcttcaagcagttctcctgcctcagcctcccgagtagctgggattacaggtgcccgccaccactcctggctaatttttgtatttttagtagagacagggtttcaccatgttggtcaggctgatctcaaactcctgacttcaggtgatccacccacctcggcctcccaaagtgctaggattacaggcacgagccatcgcgcccggccagcagatttttttaaaggtcccacagcacagaagtgaaagggagcacatagctactcattcaaggccatgcacggcctccactggggatgcggatgggcaccagagtgaccacacacacatgcatgagcactaatgggcacagctctaaaccctgcagagggaccaactcactggattctcacgatgatcctacaagcaggtactcccactatgcccatttaacagaggaggaaactggagcccagagtgaggacatggcttgtccatgtcacccagctgggaagccatggagctctgcagagcactgtacccacccccaagaagaagggcgacacggagggatggggccgaattagggaagagccagagctgcctggagacagcagtgggacactttctgctacggccagagcacggggaagcggaggagatgctcaccagcacctgtcacagctcagcccggcccacctcccgagcctcggctcccacctgtcacagtgtgctgccctggacaagtgccctccacctcaacagtttcccctgcaaggtgaggaggaactttccagaactgccacctctaggcctgcatcacagaagagggtgggggtgccatgtccctacctgggcaggggcagcattcacacctgagtgagtctgaacctcccttttcctttggcccctccaggacctatgctggtgcttgggttccactcagaaggtggcctgggctcccctgaaagccaatttggtcacatcggctctgaccacggcccatccacccagaccactaaagcctgtcacgatcatcccagggcccagccagcccctgtgctgccctccgatcacacagaagcaaatgctcgccctctggggcggaagccacctgtttttctgcctcccatcctctgaatatggcatctgggtggggcaggcagagtggctcccatagaaggagggggatgcgtgggtccctgggcttctcctccaggtctccctctgcctgggaagagccagcaggcttgaatgctccgctcctttcacagatgatgtggctttaaggaaacatgctctgaggccttgaagtgctgcgcactgtgccgggcaccaggcctccatgatgagcggaacacagccactcctggggaagggcacaagcagcagtcacacgtcgcactgaagtggctggatggacgccagagagtccagaggcaggtgagggggtgtcccccagaccatgagctccagagaacagggccaggtcctgctcaactgagcatccctaaaactcaggaacaggtcttctgactctcagagcagccctgcgaggcagctgtcattgggagtctcattgcccaagagagaagggcctggcccaggtacccagcaaactggatgctcagccaaggccggagccttctgcatgggagccttccttccttccttcctgctctctctctctcacttttttttttttttagacggagtctcgctctgtcgcccaagccagaatgcaatgggatgatcttggctcactgcaactcccgcttcctgggttcaagaggttcccctgcctcagcctcccgagtagctgggattacaggcacgtgccaccacacctggctgttttttgtatttttagtagagagggggtttcaccatgttggccaggctggtctcaaactcctgacctcagatgatccacctgcctcagcctcccaaagtgctgggattacaggtgtgagccgctgcgcctggcccttcctgcaaatttctgttgcctctgaacatgcatggggctgtctgaagcctcctccctccttcagagaggccacatgagccactccaagcaactgggactgagaggaaggttaaaatgccctttgtctgctggaagatccttggagtgggagctttgctattaatggggaaatcaaatgcgtctgcagatgtcgtggctcccgcagtgctgtggcccactgcctctcagtgggaaagcaaggttctcatcttcagccaagcacaggatgcagaaaagagacagagaagccctcagtcttggcagatccgcaggggctctaagaggacataatttgcctctgatgcctcaaatctccctcaccttgctgagctgcttctaggttgctgccagaggattcagtcccaggtcagatgcctgcctggcatcccttaacccctggcttttcccccggagcctctgcactcagcaatgcccccaaccactaccacccatgcaccggctcccggcctctgggcagcctgttagtctttcctgcctggctgattcttgccgccacctccccagcctgaccctcacgcagggacacaccagagcagcagacctacatagagccgacacctctggccaccctgtactgggctccactggcccttgtttctttgtcccttgcttcattatgaaagggacgtgacatgctgacaaaattacacatggtaaacagacaggaaacacaaaatggaagatgctggtgcacgcagaaagtcttggaggaggagagccaggtgtgtggttgagaagcccccgctgcctcagaggctcctggctcgctctgggacccaggcggtaatgaggatgcctaagcaggtccctgcagcctccggagtcaacttcctgctcatggccaaaagcccacagcgcccagaacagtactttccattggggcaaatgcccaggagatgtttgctgaatgaataaagaaccaaggcaaagctcagcaggactgaaatggggtgggcccaagccagcaccaaggagtagagggggacattgcaggggctggtgacaatgacaggccactctcccagttccatgtagagccaggcgtccgggactgtcaggtgttcccgagggaaaatactggctcctggagcccatggctgccaagctgagcttcaagccggcctcaccctccccagggtttactaggaggaaatggcatctctaagcgaatggccagggagggccagggactagctagggacagaaccatgcttggctggctgggctaaacaccagaaccccaagagcttggcacctgcagtagcttcctgctgcaggacagtcagaggagccagctggaggcacggaaagaaagggcagtggaggctgggcacaggagcgtatgcttacagtcccagcactttgggagggtgaggcggcagaatcgctggagcccaggagtttgagaccagcctgggcaacatggcgagactcccgtctccacacacatacaaacacacacacacacacacacaaatttaaaaattagggctgggcgtggtggctcatgcctgcaatcccagggctttgggaggctgaggcaggtggaacacctgaggtcaagagttcgaaaccagcctggccaacatggtgaaacactgtctctactacaaatacaaaaaattagctgggtgtggtggcacacgcctgtaatcccagctacttgggaggctgaggcaggagaattgcttgaacctgggaggcaggggttgcagtgagctgagatcgtgccattgtactccaacctgggcaacaagagtgaaactctatctcaaaaaaaaaaaacaaaaaacaaaaaaaattagccaggcatggtgacgtgtggctgtattcccagctacttgggctgaaatgggaggatcgcctgagcccaggaggcagaggttgcagtgagcagagatggcgctactgcactcctgcccaggcagagtgagaaccagtctcacgaaaaaaaaaaaaaaaaacaaaaagaaagggcagcagagtggaccggagcctggcttgacaacgggtttgtagtgatttctgagccctcctaggcctcaggtgctccatgtacactataacaaggtcccttccagccgacacccctcccagagcctgcccccaccacctagcaggaagcaccactccaaggtcagcccacccaaccagggtcctaagagaagcacgaaagaattcttagcaagtctgattggaaaggtttccatcagcaagtccttcaccatttccaaaatgcatcccatcccaaccctgctctctctgcatccctgccatggttgcagaaaccttcacaaaatccaaatcagacctcgtctctgctcacttcaccccgtcgcagcttcttacgctcccccccatttttacagacaaggaaactgagtcccagaggcccggtatgacccgccggggctgcacagctagcaagtgtgctggcgaggctggtcccagccccttctccacgcctggctccaagacataggacttcagaaaaggggaccctggggagggctggaggcagtggggtctgaaggaacactacgttaggacttcccatgcaagccttgccagtgagatcaacaccactgtacccatttcacagaagaggaaactgaggctcacagaggctaactgacctgctcgaggcaggcagaacaggactggaagccaggcagcctgtttaaagcgggtgcctgcccctcagaggcctgtcggggaagggaacccgctgtgaagggggccagccagagcctgggcacctgtggagagggacaggggtcagaggcagtccagcactgagctccttgaaacgggcctgtgagtcctcagaggtgccaaaggctggtggggccagatgaaggccagttctggctggtaagggacgtccaagtaggggtggaggaattgtggcctctggattgggtgggcatttgtggttatcagtgagtctgggccaggattcccaggaaaccctaggcacagaggggagcccgagaacaggatggcaacagaagtgtgggggcagaaaaggcccaccatgcagccccacgccctcccagtttctgagtggggaacctatggttcagagcagtgaaacggcaagcccaggccaatcagtggtgtgactggggctggagccccgctgcacggctgcgagtggcccggtgctcttcctggcctgagtgggccccacctgagtgctgggaagtcagaggtggacaaagcctctgaggcctaccggctactctaccccacctaaggcctccaccaggcccgccaagacccagtctccaagacagtcacagcgaagccacggcctgacctggccagaaagatccccggtgacctggctggggcatgtcctttgcacagcaccccatgtgctgtacactgtgcactccttgaccatcacatggtcaaggcaggcatcgggtgaaggcagacagggaggcctccagtgtgccaagtacgatggaaaggctgtaggccccagcctcggggacaccagaggcaagaacatgcctgggtgcaggagaaatgtgccctgggccaggccgagctgcccgcctgggaggcaggagcagacaccaaggggccgccccatccccgccactcgccagccggggccaggtcctggaccagctcttggcacacatggtctcatttcatcaccaaatgccacagcagaggctgtggcagaggttatcggaaaaggagacagaggtacctatccagaaaagggtaggcagctaacctatccaaagccacatagctaaggagcaacaggggctgcctggggcccagaagctgtgctgtcttcaccacaccggccccggggaggggttagagaaccgggaatgggggcgcgggcccctggggatggtggaatttggagccacatctgtgcagacatcatcaccttttaaccaaactggcccttgaggaatagccctgcctagccaaggagcagcatggtgaccgggtgacaggtcccaaccaagccacccttcgcgtccacaccagctgcatgtctacacaggctccctgctgccctagccacaggggcagggtgtccagcctcccctcgacactcctccccacctccacctcaccccaccctcacctacacgctgcctgagcttccgcttgtccttcccgctcccaagactgcctttaaccaaccatcccctgggccctgggatccctgaaccctgggcctggcctgacacacgtctaggagtcagcaatgtgtgcagtgtgactgaagatagcaaggaccccggccgcgccttcctctcccctctctcctcccttcctccagaccccacactcaaatcctatttgcctcaggttccagggagtctcacatgatgggcaggacccacacacaccacagtcatcaaacattcactgggcaccgtggggcagggcccagaggacaacagccactcccagctcacatttttcaggcttcaactctgcctggctccctgtgctgcacacggagtgtgtcacatcctcacacgacccaggaggtggaacctacaggtaaccctctttcacagttaagaacgccaaggcacgaagcttagcacagtgaatggccagccacagccggaacccaagcggtgaggctgcaagctggaagctaagtccccctgagtccctgcctgagcccaacctgaagaagcctggaaaggtatcaaggacaaaacccacagagcagttccacaacagatgccctggggtggctgcccgagggggaagcggacggtaaggctggaggtaggaagagggaacagacgagggtcactgacgctgagctggctccaggcaccacccactccaggcaccatcccggcccttgcaacagtgagccaggcagctgtgcctgggtcacagatgagaataccaaggctcggagaagccaggaaccttgcccaggtccgtcttgctatcaaaggcaggacagacctgtgtgctgagaggcccagagatatgaggggggcacaaccgcaccgggctcccgaggatggcaagggggacagactccagtgggctcaaggacatgggggtaccacttccacgtggctacctcacgcggacgccccacgtgcggcctgacccacaggaagtccagtcataatattgacacaggcagggcacacagcagccgggaagctgggctgttgcgaagttggcgcagggcatgtgagggcaccccaggctccggtgggaggggcctcaggaccggatctgggccggatccacgagaggcgcttggagggcctcttcctgccagcaaggctggcgttccggcccattggagtcggccgtgctgcagctcggggctgtttttccactttcctgccatgatgcatccatgtaccaggcagtgagaggcatagggggcatgaagcacagggcgggaccagctctgcacacacggccgaggccctgacaagtcaagtgacttctcgggccttcagctgctgcttctgtaacaccagtgctgccccttaaggcagatcggatccgctggatccatgtgttgtgtctcaggcactgagctcactgcagcggcagccacgacagtggcaggagtgttgatgatgactatgaggctgaccaccgtgacagtcacagtggaggcacggttagcactgagctcctgatggggagggcactgtccctcgccacgggctgtcccgcccctcaagacagctgcactcccttgatcccacgctcaaaggctgttggggaacatgtgccttcgagcagacaattgcccctggccgggcacggtggctcacctgtaatcccagcactttgagaggctgagacaggcagatcacttgaggtcaggagtttgagaccagcctggccaacatggtgaaaccttgtctctactaaaattgcaaaaattagccgggcatggtggcacacactggtagtcccagctacttgggaggctgaggtgggagaatttcttgaacctgggaggcagagcttgcagtgagtggagatcgcaccactgcactccagcctgggtgacagagcaagagtctgtctcaagaaaaaaaaagagagagaaatgcccccaggtcccaccagacccttgcccagaggaggccatttccccatccccctgccccatgtggcttctctgatgtcaggcatgtcccacgtccccacccacctgacaaggaacctgcatgcagccatcctttcctcgcagacgctcccttttccatgcctctcaattcaaagggaaggaggcctcaagtggctgctggtgactctgacgcctgccttggacacttaccttgtgactaggacagcctggccgaggctccaagatctgtctcagcagcaggggagagttggagggtgggcgctaggggtgcaggaagccccagcctgaggagccggcagactaagagcccctgaggccctcggagagaagcacgttgggggttcccaccagctgctccttaacagcacctccacctcccagggaggcttcctgacctcaggtacatggggcttctgggcagacacctggtctacatgggtgttgttattggtgccagccattggtggggccaaacctggcctctgacccctcagcccttccaataaccgcatccgcaggggccccctctcagccccacctcgcagggaggtaccatctctgagttccacggaaatgcgaagggggaagccccaggattctgcagcaagaagcacagggtgccccttaggaagaaggggcagttttggcctgagatagaggaaggccagaaaggcgactaaaaatttcatgagcaaagatcattaatagcaatagcaacatcgcccatccacgctggctttattgctttattacaaccatgctgctaccgtaagcgggtggcaggcaaagcgacaggtgtactgggaccgctgtgtgcctggagcccggctgtccacaccaagctcctcagccaaccctgaggaagggacgctatgctcatcttagaggaaagaccaaacgcctttctaagaacgcacatggccaggtctgaggccactagggcagccagctccagcacagccccacccacctcacccaggagtggggcacagtctgcccgcctccccaggagggcactggctcctggaagaggggagtctctagcactcggcctgcacagggcttgtgaggccctcacagggcggggctgtggcctgggcagctttaattctctagagcccctgcccagcccctttaggcctggctgtcccctatgttcttcctcctgagtcttgggaaggagccctcttggctaaggtggttttgagagcaatcccaccagccccagggcggaggcatgggtgggtcagggggaaggagaagagccacagacgccaccggaaggatgcggcatcgaacaccaggtccttgggccgtggtggcggcactggtcccacagttgcttcccaccaatggctcttacccctctgggactcttacctgcccacattccactcctggcagggagtgaggaatggagatggagtatggggcttgggtggggggctgcctcccctctgcccccagtggaatcttcatccccaaatccagctgtttccaagccctcttccccatctcccttggattaacagaggatccagaatggaaaggaccttgggagataatttacctcctttgattttagcccaggaaactacaagcaggagaggggaccagaacttgccaagtttacacagcagggcggtgcagaacagaattacacataataagggcacagaggccagagagggcagaggcacttcagcaacatccggccagctcacagaaacccccaaacctcagtctccttggaaactccagctaagtcccatgagcagcccgctccatctgggaaggcgggtacccccagtctctcttccctctgctcccacagctgcccaagggggacagtgcctagcagctgccaacgctgtcctcaccagaggggctcacacccaccgcccatgccaattcaagcaagaggctgtgacgtcagctggacaggtgggactcagcctggtaggggtgccctggccagggagggccttgggagaaaggcctccaggaacacacacccctgcactgcacacaccgggtggggtccctgccttgggtcattttcagcatgggatggtgggacaaatgtcttcctaggagggtgagcccagcagctgcctggaacctcttgcacacctgcagagccctgcgcctgcctgccagtgccttgcgagacaacagctggttttgaaaactgtggctggggaatctctgcaggctccacctcccaccctctgcgtccatcctcaggaccctcctaattggctacttcccatcaggcaaccagattctccatcccccttcccccaggacctttgagtcaggctgctctgcccccatttcagcttctcttgagatctctgcccactgcccagggcacaccttgcctgtaagcgaagggtccccacagccagcccaggctcaccagccaccaacacctgcaggagagagaccacacctctgcatcaggccagtgtccccttttttgaataaaataatggaatcatctcaaggtccagcagtaacacaaacaagggaaactcccctggaacagaagctcagtgttctcagcccagcatcttctgaaccgggaggcccagtgggcagcctagcacttaccgtctcctatctgagcccacctaagtctcactgtgccacgcctggcaggaaatggggagggcggggagtcaggacaggtggcaggaacagggctgcctctagggcaactgatgaaccctggcagcagcatccgtgacactggagagcccaacaccagctgccactgtgtggccctgtggcattggccacaaatgagcacatccatcagctcctgagtctcaagctgtccctcccaggctgactccgcacttctggagagaaaggggccgccagctacagaagtactctccaagatgtatccctagaggccatgagaattttctaggcaagagtttctggggctaagtgaaagtgcttggcctaaagctgggagcagtggctgaaagaggcaggcctgggtgtttccactcatgcaagagctcttctggagatggagcagccaggcagctcccgcagctgcttctccttggagcccaaacccttttacacccattccctcctgaaggccttgttgcacctctgagcaaagtggggcagaggctgctcctccagactcaagggaagggttttgttttgggtcaccaagtaggttagcagtgaaatgacacaaaaactcatgccttggaaattgtccatggaatttcattcagcctccaaagaagacccaggaatggggtaaagcaaataacacagccccgctgggctgcatctcagttcctgacagtgcaggcctggggcctggcagggagttttacagggagagaaagaaggcatgagaaagtggggaacagccaagcgggttgtgcgtgatcccagtagagttgggggtgagtgtgcctggttgcatggcttcctggggacgcctcagggttcctcctccaggaaagagggcacccttcaccatccatgcctcacagcaccaggccaggcccgggacatccacaggtgcctcagaccccacccctagtttccaagagctctcagtctaggcaggaggcaaaacacacactttcaacctcagttcccggggctagggctcagcactgccgcagggttcaggaaggcacagggaggagggcccagccatgtctgcacagagccagggctcagggaagccaggctggaagagccaaggcagccaggtgaaggcgggaaagctggcgaaggggaggaagcagaaagtgcaaaggcactgaagtacggagaagaacgcgtctgcagaacagtggtggctcaggtggcccaagctctgggagataagtttcaggagatgcacccaactgggcgcaggggggcaggtcgcgaacgaacctcaccagccatgcttagcctgaaggccaccagccgggtccacagaaaggtggaagtaggaggcccaacctactgggaatgcctaagaaaagggaaagtaactaaggcagcctgggtcccctgcctcctctcctcagtgtgggagggatcccgagagatgtctacaccaaaccctactgcccagggccgcacgctgcctttcggttagggtgattctgctcacactagcagtgtccaatagccttcatcatgctgtaaatgccagaaccaaaaataaatcatccagggaagacacgcttgggtcccacccagccatctctggagtatgaggaacctacagggagggatgggccggctcagtggaagagatcggctcagtggggatcctgcctgccaggctccaggtgggagtgcgctccctctcccctcccttttgttcctgtccatgtcactcccagccatcctggcacaggctgtgagctgacccagttcgagacaccttgttgtacactttgtcaccacgttgctcaggcaccacaattctaaagttagccctagcctgatagcagaggctccccaccaggccagtgccagcagcacacagagtaatgctgctgcccagctcagctgccattcagaggcaggcagtgccccaggggcagcagggctgttgccagctaaaagcccacgtccactgcctggctctgaaagatcccacactcatgtgccgtggaacggcttgcacttgagacccaacatcaaggggccaggggagtgagcgtgggcactggggacaaggcactgactgtccccagccatggagctgaagctagacctgccattcgttctgcaggagtccagctgtgagcacagcccagacaggagcgggggagagctaggagggccacagtatcttaggtgacactggtctgaagagacaagagctgtgctcctagagccaaggtctcagtcaggcctgatgagccagctggctctgctcaaagaaaaacccttcttgtgccacaggctccgccagtaagcccagctcagctcagctttcccgcaagtgcaagaggccctggcagaggacgacgctttctggtccagaaacactggcttggagcccactggatatgcggccatgccctgggagccagatttctgagccagatggaagcaagggtctcagacagtttggctcatgcccccatcctaacttctgacacacacacactcacacacatgcacacactcacacacctacacacacacacacatgccaccatccttgagcagacagtccagattgcaggtatgcacttggggtcctccctcacaagccccaggcccacctgtagtccaccttttgtctacactcatatccctttccttggcctcaactcctgcccaccctgcccctatgactcctccaaaaagcccacgtgggccaagtgctgccctgcctatggcccaccatcacctcctccagcccccacgaccctgtctccccacgcattacctggttatgctctctccgtaactccttggttaataagttgtgagctttcttattaaccaaatgctgatttttctatgtaacatctaatgtccaatctgaccttgttaatccagtgccagcccaggagggcagggtcccgtcccggcacagagctgccccagagccaggacttggtaaagcgcagggattgcagcatttcagagctagatggggcctcagctgagcgtcctcactttacaaatggagaaaccgatgcccaggaaggggatgtgaatgacaagggtacagggcctgggctgatcccatagcacctacaaggtcggctttcccggcacctggagggatcccttggggcactcagaaacgagccatagaccgctggctggggatctgaaaatggaaactgaggcagcagcagcagcaaactcacactaagggtggtaggcaggtgagggagctgcaggtgaggaggtgactgaggtgaggcaggagcacccacaccttttcttccttctcctcctcctcctcttcctcctcccaggagccaggagaagcacacctcaccttgcccacagcgccacctaccgtctggccaccctggggtgcagctgctgccagtaccagccagcaggtcaaacatccaggcccaggaaaccccaggcccagccagcggcccagcgcagcaagtggactctcacctcccagaaaggaaaagctgcctcttcccaaacaactctccagactacagtggccaactgtcctgttctgcccaggactgacttgggttccagggaaagagactctcaggctaaaagcaggaaagtccccggccagagggacaggtcagcgtcctgatacagacataaggcctgctgcccctctataggtatcctctgcagggccaagggctggggctttggtctggttgacagtgagtgtcagaacacctgtctgcagctgacctgtcaaatgcctttcctctctggagcacatgtgcaggagccacccccggcccaatggagcgagaggtcttgggcagggtgcactgtgggagagaggggcctcagaggggaggagctgcacactgaccttgaggatggacttgggtgtccccaagcaaagacctgcacatgagagccaggcacccagggagagcagaaagcagggtggccacgcagggcttggaaggggacaaacaaaggcaccaggaagcaccctcccaaggctggaggaaaccggcgtgaccccgtgtgcatctgccgtcttggcaggattccttacagctccccttcaggtttacggggtcccagtgaggaagggaagtcagacacaggcaactctgcctagaaatccttctaggttggaagtagggttccaacttgctatgtctccagcagctttgatgttggttacatgcaactggtcttcaataaagttaaaataccaaagcatgtgcacactttgctcttgtaaataactgctcaaggcagctgctgtgcctcccatgctggctccctcgggacaacacagggcatggcagggcagggcaagcaggggggctctgggagctggagtggcacaggctgcctatcttatcttcactgggatgccaggaatcgctgagcctgctacaaatgactgctgctctttacctccatgcagtgctttatttcacagagtcggggtgtgcatagaacctggcacaatggagcctcaccttgtccaccaggtgccactgcagaaaaccagtcaatgggcaatccacgctcacaaagccaataaacactgcctggacatccatttctgccaggcatggtgctgggcacaggcactgagctacaacaggtgccctaccctccttgacacagaaggtcaggcagcagctgccacccggagcactgcacatgccaggattggggacacagaagcagagcaggctccgcttcaactctcttaggatgctcctgggaaggggacagtgagagacaaacagtgacagcaggtatggcaggctgtgctgaggggtaggtactcagaacgcccaggcagccatggccctcaagggacatcaggcaatgtctggaaaccactcagatggcctgggcttggggtactactgacatctagtgggcagaggccggggacattgctggacacctgtagtgccagggatggccccaaaagtcagcaaccctgagtcagagagggcagggtgaggaggcatgagggaggggacacctgacaaggaccactccaagctgcggtaacaaaggtctgtgggcagccttgcacaagagaagccagatcacccagaaaggcccaagacctgggatgactgaggatacaggtgggaggacgcctgccagaagggcctcccgggacaggggaaaagttccatttcctggaaaacctggggacctctgagcatggccctcaagggtggctagagaggagcagtggggagactggctgcaagcagctgctgctggtgatctggcgggggtgatggcacgaagccaggtagagtccgcgagggtacagatccgggggcaggtgagaagagggagtccatcctggtccttggaccactgccctggcatctggagtgatagggaaagaacagaacattggggaggtcttggcaggggctccctttggagactggagactcccacgtagggccacagtgcctggacccaaggtcctgaagccctgaggagtccaggccacagactgagactcagatgacagagggaaaagcctgtcagtccctctgtgacaccttgatctttgtttcctgagcccttatcacagtgttcattacaaacatatctgtgctctggaaggacagaggtcattcactctctgaggacacacacagtgcctggtgcatggcaggttctcggtgactattcgctgagcaaatgaacatcaggtggaggaagcagaattcacaagaacagcaggaagagagccagaaaagcatcgtggcgcacaggaaggccggtctccaggaagagtgagggtccgcagtgtgaactcccccaaagacccagaaagagaaggccgggaaagcctcccatggtctgaacaaggaagagcaggaggaggccttgggaagaaatgttccaacagagtggaggagatgccagctggccaggtggagggaggggtgggagcaggtggctcacctaggaagcctgggagggaagagggaagggacggagtgggtgctgatgagcagaagcgggcagcaccccagcccaatgctgggaaaacactccctagagccacagcccagaaaggcacacagtgggcctggggccaaggcccctctccagtgcccccagctccccaggagtccagactcacacacagtctgttttgttttgggtttttttttttttctgatacagggtctcactctgccacccaaactggagttcagtggcttgagcacaactcatggcagcctcgacccccagagctcaagtgacccacccacctcagccttcccagtagccggtgctcaccaccacacctggctaaattttgtatttttacagagatgacatttcaccacgttgcccgggctggtttcgaactcctgggctcaagcgatccgcctgccttggcctcccaaagtgcttgggattataggcgtgagccaccatgcctggccttctcacactgtctggagcccaaggacatccgtgtctgacacaggcaaaaccgagctcttcctccacaagcctctcctcccacggttgccccagggcagccaacggccttgcctcccacgggtcactcaggcccaaccatgggctggccaagccacctctctcagctctccctgatcactgctcccacctccgccagtcccactgtggtcaagctgccatctggggcctgctggcctctcagctccacctttgtctcttctcctctgtccttggtgcagtgaccttgaaactctgactcagatcatgccacctctgcaatggctcccagctcagagtccagggaatgtctctccccatggcccgcaaggcctgcaccaccgtccccagccacctctccgtcctgctcctccattctccctctgcctggctccagcggcagctgtcccttaaaacctccgaggacactcaagagtgccccaggacttttgcacttgtgttttcctgacagaatgctcttccccagacacctgagggccctcctgcatgagaatcaggtttctggtgaaaggacacccatcagagaggccttccctgaccaccacccctgtctgtccctccccttgcctgctgtgtcaccggcagtgctatacattcattcaccactgaagctgctgcgtgagggccaggggccgggatggtgcccagcgcacagtagatgctcaataaacatttgaagaatgtatgaatgaacctcttcaagcttcagtctccaaaggggatattaacagcatttgctgtgaagattcattgaaatactgcatgacatgcactgggcacaacacctgagcatgagtcccgccaccaccagccagccctccgcagcaactgcagataaaaatattcaagagccaggcgtggtggctcatgcctgtaatcccagcactttgggaggccaacgcgggcagatcacctgaggtcaggagttcgacaccagccttgccaacatggtgaaaccctgtctctactaaaaatacaaaaattagtcaggcacagtggtgcatgcctgtaatcccagctactcaggaggctgaggcaggagaaccacttgaacctgggaggtggaggttgcagtgagtcgagatcgtgccactgcactccagcctgggcaacagagcaagactctgtctcaaaaagaaaaaaaaggcctggcgcggtggctcatgcctataatcccagcactttgggaggccgagtcaggtggatcacaaggcctggccaagatggtgaaaccccatctctactaaaactacaaaaaagttagctgggcttggtggcaggtccccgtaatcccagctacttgggaggctgaggcaggggaatcgcttgaacctgagaggcagaggttgcagtaagccaagatcatgccactgcactccagcctgggaaacagagtgagatgctgtctcaaaaaaaaaaaaaaagaaaaattcaggaaaaaaataaaaacaaaaagtaataacataaaaaataatacagtgtaactacccagcatgtacactgtcttgggtatgataagtaatctagagatgatgtaaagtatatgggagggtgggcatacgttatactcgaatacaacattgtttcccatcagggacctgagcatctgccgattttggtatccacggggaactggaaccaatctcctatggatacccagggacaactgcattgataactattaagttatttaagtgcttccctggttgtggcctgttggcctgtctttgtttttgttttttaagacagggtcttgctctgttgcccaggctggagtgcagtagtgtgatcacagctcactgcagcctcgacctcctgggttcaagtgattctcctacctcagccaacccagtagctgggactacaggtgcacaccaccacacacggctaatttttgtattttttgtagtggcagggttttgccatgttccccaggatggtctccaactccttggctcaactgatccacccactgggcttctggcatcacagagctgggcctcgtcatcccattccagatgccgtccggatactctccccggcagcagcccacggaactgcaacatgtttcttaacttttctccttttgaaaccactttgaagagctcactccctctcccaccaatgaccacaaactgttccagtgaaaaactatctcaaaatgagactaatcaaaagcttatgaccaaaaaaaaaaaaaaaaaaaaaccgtatgccaaacacacagacacatgctgtcttccaaatcttactgcatctttttttttttttttttttttaaagacagagtctcactctgttacccaggctggagtacagtggtgccatctcggctcactgcaacctccgcctcctgggttcaagagattctcctgccccagcctcccgagtagctgggactacaggcgtacaccatcacatccggctaaatttttgtatttttagtagagatgaggtttcactatgttggccaggctggtctcgaactcctgacctcaggtgatccacccacctcagcctcccaaagtgctgggattacaggcgtgggccaccgcgcccggccaaatcttactgcatcttaaccactctgccattcatgagccactgagaaccttcacaatgaacttcactttaaaaacacactgttggctaggctagtgggaagtgacctgagggggcttgtgcataaataaaagcgtcctcaggacctgctatgcattcagccagccaagctcccagtgctgggagacccatatgtacctcaatgactgctggtcaacgtcaggcctgcaggaagccagagggcagggacctcctccggctgtaagagcccaacatctccctcagagaaggactgtggacagccaagagcgtggcacacccaacactccaaaggttaggcccacaacgtcttccagcaggggtctttggctttttaaataccctggcctcgcttcctgtggctgctgtaacaaatgactgccaacttaggggctgaaaacaacagcaatccccaatcagttaccactgggccaaaatcaaggtgccgactgggctgtgcttccaccagaggctctgggggagactccattttttgcttcttccagcttctggtgggcctggccttccttggctagtggcttggtcactccagcctctgcctccatggtgacaagagacactcctgtgtttcaatgtccctgtgccactccattgttaaaaggacacacacaatggcacttagggcccacctgggtaactcagggccatctccccagctcaagctccttgacttcatcacgtctgcaaagatccttgtgtgtgtgccatataagagaccttcacaggatgtggacgtctttgcaggaccatttttcagcctccaaacaccctcctcacccttcaccacctcatatctctggcatgctgggtgtgtgcaaaggtgaaaggagagaggaagcatgcaggccaggcagtgggaggaaacgccaggatggccaggcacttcggctgcagccctggctccagaggcccatgtcaggaggctggggccagctggggacggtgtggctgagagtacaggtgctccccagcccagccaaggcttctcaggagaaaggggtgtccgggaggcctgtgtttggctacaccaagctcgccagtctcactcccacctctggacctcccctcgaagcccctcccttgtgggccgccagagcatccatcctcggagtgtgtccagcatgttcaggacagcaggaacagggcattctttggaatgcactgtctttgacatgagcaggctggcccccacccacttctctcaccagatggagaaaaatctcaagtcataaactaaatgaaaaacatgtcctgttctgccctgggatcaagggttcaccttaaatgaaaactgtctggaacaatgtgctgctgacgctgatcttggccttactctgcagattagcctcgggggtgatcacaggacgctcagggctctgcatcagcaagcccaacccccgctgagccccaggaccacccactcccccagcaggatccccgggaagcagcccagaagcaccccccagagacagccttgggagagcgggccaggaaccccaagagcttcaccccacagtctgggaggtgtgggaggcatctcagaaaggctgcagaaggaactgacggccctcccctcccacactttcctcgaagggcccagagcccacttcccatgcagtccacccacccctcggtgctggtgcccgggcacccaaacatcccctggcacccatcacgagctggtgccacgctggtggcttcctttcaactcatgccggcttgctcctgccacccagctcgcctaggtccggaatgcgcaggccgttttgcaggaagcctcatgtgggaaaaataaccatgtttgtggaacacacgaggggtgggagattcacaagcaagtggctttactgtgtgacatggcagagagggaagagagcccctacttcctgggcaacccacttcatgcatgagaaggccaccagactgccaggcacatgtgaccaatggcagccccaccatggcagcgttctcctgcaggttcttgtgagggtaggagggccacccctacagtcctggaccatcctgacgccagcctgggcagcccaatggctgctggatccccaaggcaagacggcaggaagcgcctagtactccacaccagccagcgacagacacgggagggaagagcagagctgtctgtctgtctggccagccagcagcaaccaccgcgatcccctgcatgtggggctcaccaagcagtgagatactcccgtctggacagtgtcaggcacatcacttaccacattccagtagagcggattgaaggtgatggtgatgacggcagccacaaagctgggatccagggggtccacgtagcccagcagccgggtcataacgcagaagtctgcctgcagggacagagctagcatcagcaccacccagacacagcagggcctgtgagcccccaggagtcggagaaaaagttaccctctgggaacacactgggaggcctgggaacatccaagtccggcaaaggttactacagtgtagtctcataaaagggaagataaaaagctgaaacctaatgagctgtgtcatgtcctgggagggcggccgcagaaatgtgcctggatgccagatgaggaaatcagcacctctgaagaggggtgcctggcaccctgaagggaggtgacaccaaccctggtgtgaccgagaccctcctggatgagggttctcagaggccccagaggaaacccaagcagctgagataaatgtgaagagatgctcaacctaccaggaatcaggtaaaagcaaattaaaacaatagtggtgtgcctctcctcgcccacactcgacaggggacaatcttgagtgcacacgagggtgtgagtggggcggggtaaactgaaaaagtgtgtgcccacatcccggccacgccacccgcatacggggggcacgtggacactgcccccgccccgccatcatcttgcatgaaaacgtcaggaacaatgacaaacaacttaggtgtccagcaaccaaagaaatgaagaaaaaaaaaaaaaacccacggcccattcctacagcagctaaactacagcagttaaaagcactaggtcggccgggcgcggtggctcatgcctgtaatcccagcactttgggaggccgaggcgggcggatcacgaggtcaggagatcaagaccatcctggctaacacggtgaaaccccatctctactaaaaatacaaaaaattagccgggcatggtggcgggcgcctgtagtcccagctactcaggagactgaggcaggagaatggcatgaacctgggaggcggagcttgcagtgagcagagatcgcgccactgcactccagcctgggcaacagagtgagactccgtctcaaaaaaaaaaaaaaaaaagcacgaggtctacacacagcactgtgaaacgttctgaaacacacggctgagtagaagagcaggctgcatgattcagcacctagacagaaatttctagaaaacaacataaaatatagtatcaaatattcagattttacaattttttttttttttgagacagagtctccctctgccacccaggctggaatgcagtggcgcgttcatagctcactgcaaccttgaactcctgggctcactttgggaggccaaggtgggagaatcacttgaggccaggagtttgagaccagtctaggcaacatagtgagaccctgtctctacaaaaatgtaaaaactagctgggcgtagttccagttacttgggaggccaaggcaagaggatcgcttgagcccaggtgttcgaggctgtagtgagctgtgatcgtgccacttgcactccagcctgggcaaccctgtctcaaaaaataaacaattaattaatttaaaaataaattaaaataaaaaactttttctaaaatgcactgaaaaatattatggtgtctctccacatgcaactcaaaattttttaaaaatactaaattataaaataagtgtaaagttgtgctcgcttcagcagcacatatactaaaattggaacaatacagagaagattagtatggcccctgcacaagggtgacacatacaaattcatgaagcgttccacatttttggacacaaggaggggaacatcacaccgaggcctgtcagggggcggggggctaggggaaggatagcattaggaggaatacctaaggtagatgatgggttgatggatgcagcaaaccaccatggcaaatgtatacctatgtacaaacctccatgttctgcacatgtaccccagaacttaaagtataataataaaaatttttttaaaaaattaaaaacaaaaaataaaaaaaataagtgtaaagtccatcagagctgtgatctttcccataatggtgtgttttgttctattgcatttggaaatacagtaaattccttcaaagagcgctttgatctcccacattttggggaagcggtggggaggagatggtgcttctgcccagggtcagccagccctggggggcaagcgcagcctccactccaatccttgcttccccaaacgacagtctcctgacataactctgcctgctaccaggtcacttgcagggtgtgaccatgggatgtccctcagacgtctatcagtataaagccatcttctgctatggcctgccatccttcccacgtgtggcctccccacctgatcagcctgcatccctgaggtgcaaacaatcatctcactgtagggccaagggcagggctaagcagatgttaaatgctctaggccgggcgtggtggctcatgcctataatcccagcactttgggaggccgaggtgggcggatcacctgaggtcaggagtttgagaccagcctggccaacatagtgaaaccccgtctctactaaaaacacaaaaattagctgggcgtggtggtgcatgcctataatcccagctactcaggaggctgaggcaggagaattacttgaacccgggaggtgggagttgcagtgagccaagatgcgccactgcactccactgggtgacagagcaacacttcatctgaaaacaaacaaacaaacaaaatgctccaatgcaggcccctcctaagggatgaatgagctgacataggaccaaaggtgcactgctactggaatctgtagacagaatagctgagtgaaagagtggccacggcagcaggtgtgggcatcagtaaacaaatgactaagaaaagccactccgcaaatggcgggaagaaggaacccagggaagcaccacttgcctagctgtggccacagcctctgggaactgcgcagtgcctgcccagcgcctgcagccaacaaggcctggcgctccagcaggtgcctcccaacgcctggggctgtgagcctaggcccacactccccagagcagacactggccgctcatgaaggacaactgggccaggctcagagcaggctgtcctgccctgaagggaggggaagggaggggagggaaggcctgtgatgcagccccaaagcttctagaacctggggcttaacctgaggcctggccttatcttcagcttgatgataacatctattaagcacctccagtctaggcatggtggcctgtaatcccagcactttgggaggctaggcaggcagatcacagggtcaggagtttgagaccagcctggccaatgtggtgaaaccccatctccactaaaaatacaaaaattagccaggcatggtggcgcacgcctataggcccagctactcgggaggctgaggcagaagaatggcttgaacctgggaggcggaggttgcagtgagccaagattgtcccactgcactccagcctgggtgacagaacgagactccgtctcaaaaaaaaaacaaaaacaaaaaacacgcatccaattccaaggccctgtcccttgacagcctggtggggggagggtggaaagctggctcagggaagagtcgtggctttggtcatgcctggcacttacgaagtgcaccaagagtgagttatctccctgcatgtgcacagcagaccctatgagtgggccagcggccagttttcacccatccctcccactccccattccccattcagcccccagccaaaacctggcctcaccctacccctcccttgcctcattcccattaccaatcctcccgtggcccatctgttattccgcctcttacacaaccacctaatccactccctcctccaaccctggctttgccggttgctccccagggcacagcaaaggacctcagtggcctcctgcctttggacttcccccagagccctccccatggacccttacctatggaccagcatgctgttagccaagccaaagaggagaaagggcagagtgtgagtcacagagcagagccccgctcagctaggggaaaggggaaagcaggaaaggcctagggacactgagcctggggccaggaagggacagagggcattttccagggccaggaaaaacacttcccatatcactggcgccccttcaactctacagctaagagaggtgcatcttcctgagtgtaaatgatctctctactacttccccactgggccctgggggaaatgctgcctctcataaggaattcaactcgatgttagtcaccttagctgagctccactaaggaggccctcactctaggggatctaagaaaacacaggacctgtcagtgagcgcagacctatctctggccatactctcagccaccctaaaagtaaagccttgttgttagcctactttccagataaaagagcaaagcctccagaccccaggcagtgaggagcagagccagcctgagcaaggccagccctaccagacagaaagccccataaaaatgggacaaggataaaagtgagtgcttctgggtcttgaaacccaaggaaactgggaaagtgagcaagaaatatgcttttttcaccttctgtgggagccaagatgaaggacggaaactgagcactgaaagattaagcaactaacactgggggaacccagcagcagctgacatccacctgagtctcccaattagggctgaactggtcaaagctggaacgtatccaccccctcccccctctccctcctgtgcccaggtcccaatggcctcaggtcagcctgtctcaggagggtggtggtgtccatccggtcacttcagtcaccttgaggaggatttatgttgcccggagaagcacctgcttcgctggaaagaatgactaatggttcagagtggaattctaggcagcagagggaagcccctcccagctccccgatccccactcagagacatgatagtccctttctcatagctgtcatttccaaaacccccctcaggagggtggacctccctcctgaaactggattggcaaaaaagaaccaaaaatccaggtcagacgtgagcagagtaggagagtcctgggtcccacatccaggctctgcctccgggtgtcagagtctcccttgatggcctccccttcacacctgtgaccaaagggcggtctcccatccactcccagccccaacctccttcatacaacagaggtcccggctttctgctacccagtaattctaatggaacccccactccaaggctccaggttgcagaggcctcggaatctgactaaaggaaaggagctacccaccacggccaggaggtctgctgagctgcaggaatagctcgagtcccacaggtcaccgacgaatagcctcagctgttaacaccccaaagcatgggtaaggaagaggctttatggtaatttactccattgaggggtgcagggttctcgggagcagcgctctgtggtcagggaatgatctgcagtgggtcaacatgtcacattgtgacacatggacaaacagcaggcctggacaggcaaagtcacatcgattccaggccacacaccacacacaacaaagggcaggggaatgggtgggggctgctggagaggggacaggtcctcctgggatccatcacccctgcagaatctgcctgcagcgctgcagcccccactgcccccagagctgccctcatgccctggcaccataagctgactcgggtaacgtttatttagggcaactttgggttagagccctgtgcctggcacaaagacataaggatgagtgtgccagagtctttttcctctaagtttattctctgggccgggcgcgatggctcacccccgtaatcccagcactttgggaggcctaggcaggcggatcacaaggccaggagtcagagatcagcctggccaatatggtgaaaccccgtttctactaaaaatacaaaaattagctggacatggtggtgcacgactgtagtcccagctactggggaggctgaggcagaagaatcacttgaacctgggaggcagaggttgcagtgagccgagatcatgccactgcactccagcctggatgacagagcgagactccatctcaaaaaaaaaaaaaaagaagaagtttattctctggccgtgcccagtggctcacgcctgtaatcccagcattctgggaggccaaagcaggcagatcacctgatggtcaggagttcgagaccagcctggacaacatggtgacactccgtctctactaaaaatacaaaaatagccagacgtggtggcaggcacctgtaatcccagctactggagaggctgaagcaggagaatcgcttcaacccaggaagtggagattgcagtgagccgagatcacgccactgcactccagcctgggcaacaagagtgaaacttcatctcaaaaaataaaataaaataaaaatattttttaaaaagtttattctctggtagaagaggagaagccatttcatattaagccagccccctaaccctgtttttccacataagaggccacctggctcagaggactctggcctttggcagccactgtctgagctgggagcttcaccacccaccgtgagggaccatggcaagcctcccatgaccaatctaagcccaggtttcccttgagtggaatgggggtgatgagacaggccacctgaggttaccttctgcacagaagcaagaacagatgtaaaagtacagggcccactcagggccgaggctggcggcccctctactctgtctgcttaatgtcaactaatacaggtccctctctcaccattcactctctggagggaccctcctgggaagaccccgatgctggaatctgaggtcaggcaagccctgggcagcaaaaaccacctcatggcaggaggggtggaagttagaatgtcacaatgcgactgtggtctctagatcccacagtaaaacgaaatggcaggcagctgctccagttccctagatccataactcctttcaggagggtgaaatgtcattcattcttcaattaacaagtgtgacctgcaccaaactcaaaaggcactgacagctcacgtgctccagcaggggtgggtgtggggcccacgggtaagacggtgcttctcaaggccctgctcgcctccacgctgggctgcctcttctcactcctctgctggttgtgagcttcaccccattttcttttttctttcctttttttttgagatggagtctcactctatcacccaggctggagtacagtggcgcgatctctgctcactgcaagctccacctcccgggttcacgccattctcctgcctcagcctcctaagtagctgggactacaggcgcccgccaccatgcccagctatttttttgtatttttagtagagacagggtttcaccgtgttagccaggatggtctcgatctcctgacctcatgatccgcctgcctcggcctcccaaagtgccgagggattacaggcgtgagccaccgcacccggcccaaacctggctaatttttttttattttgtagacatggagtctcaccacattgcccagtttggtctggaactcctgggctcaagtgagtctcccacctcggcctcctcccaaagtactgaaactacaagtgtgagccaccaagcccagccatcttccttttctttacctttaccttccagggcccaggacagaacctgctaggtgctactgtgtctctgtgtaaatacacattgtattttgaagacaatagtaacaataagccagccaaccttcactcggaagtgaaccagctgccaagctctggcaagggacttgcaggaggcagaacagagtgctgatgagacaaggacgcccgtgccacggcgggcagccatctcccctcgctgagcaccgcttcctagcctgggaggtgggaatggtagaggtgccatgggacgccaggaggattaaatgagaaagtgcaaggaaagcactcagcgcagtgcctggcggggggcatggctagacagacgctggctgtgacaactgtgtcatcgagtcctggtgacaaccctgcgaggcatgcccactcttcagattaagaactgaggtgagtggccaggcgcggtggctcacgcctgtaatcccagcactttgggaggccaagacaggtggatcacctgaggtcaggagttcaagactagcctagccgatatggtgaaaccccgtctccactaaacatacaaaaattagccgggcgtggtggcaggcgcctgtaatcccagctactctggaggctgaggcaggagaatcgcatgaacctgggaggcggaggttgcagtgagctgaggtcatgccactgcactccagcctgggcgacagagcgagaatccatctcaaaaacaaacaacaacaacaaaaagaagtgaggtgaggtatgaagcaaaagctgacagaactaaagggtggaaaagacaaatccacagttcttgttagggccctccatggtcctctcagtgactgagagaatcaaagcagtggacaagaaggctgctggagctggcaaggtcaccaagtctgcccagaaagctcagaaggctaaatgaatattatccctaatacctgccaccccgctcttaatcagtggtgaagaacgtctcagaactgtttgtttcaattgaccatttaaatttagtagtaaaagactggttaatgataacaatgcatcataaaacctttagaaggaaaggaaaatgttttgtggaccactttggttttcttttttgcctgtggcagttttaagttattagtttttaaaatcagtacttttgaatggaaacaacttgaccaaaaatttgtcgggccgggcgcggtgagtcatgcctgtaatcccagcactttgagaggctgaggcgggcgtatcatgaagtcaggagatcgagatcatcctggctaacacggtgaaaccccgtctctactaaaaaattaaaaaaattagctgggcgtggtggcaggcgcctgtagtcccagctactcgggaggctgaagcaggagaatggcgtgaacccgggaggtggagcttgcagtgacccaagatggcgccactgcacttcagcctgggcgacagagcgagactccgtctcaaaaaaaaaaaaaaaattgtcacagatttttgagacccattaaaaaaaatctaatgagaaagaaagaaagaaaaagaaagagaaaaagaaagaaagaaaaagaaaaagaaggaaggaaagaaagaaagaaagaaaaagaaagaaagaaagaaagaaagaaagaaagaaagaaagaaagaaagaaagaaagaaagaaagaaagaaagaaaaaaaaaaacgcaggtggaaaatcgggaggacgcagctgacctgagcagcgccatccagtggctggacctgaccacagcacatggcagccttgggaacagcctgcagtctctggtgtcaccaaaacagatcacacttggggccaccaaacaaaccttaaatttaaacgaatagaaagcatacacagtatgctcccaaaccaccacagaattaaactcgaaatcagtcacagaaagcgatcgtggaaagaatgcacgcgagggccaaatgggaagtcttgggaaatctagaaacattttgaactgaatgaaaatgagaatagaacacatgaaaccctgtgggatgcggctaaggcagggcttctattagtaaggaagaaaagtcccaggtcaggaatataagctttgcccttaagaaattacagaaagagtggctgggcgcagtggctcatgcctataatcccagtactttgggaggctgaagcaggcagattacttgaggtcaggagttcaagaccagcccggccaacatggtgaaaccccatctctactaaatatacaaaaattaaccaggcgtggtggagggcgcctgtaatcctagctacttgggaggctgaggcaggagaattgcttgaacccgggagacggaggttgcagtgagccgagattgcaccactgcattccagcctgggcaacagaggaagactccgtctcaaaaaaagaaagaaagaaattagagaaagaggaatgagttaaacccaaaggaggcaggacaaaaaattaaagataagcaaaaatcaatcaaattgaaaacaggaaaacaatagagaaaaaaaaattacacccaaagctggttctttggggaaaatttattttcccaataaaactgagaaacctccagccagcctgaccaagaaaaaaagagaaaagacacaaaatatcaatatcagaaataaaaggggggacttctctactgacctcacaaacattaaagtaataataagggaatactatgaataacacaaattaagtaacttagatgaaatgaaccgatccttgcaagacacaactgtcaaaattcattcaagaaataatcctttatcttttaaaggatttgaatttatggcttaaaaacctaaaaaaagaaagccttgagcccagatggtttcctggatgaattctgcctaacatttaaggaaaaaataattccaattccacacaatctcttccagaatatggaagagggaggcaatacttcccaactcactgtattaccctaacactaaaaccaggccgggtgcagtggctcaccgcctgtaatcccagcattttgggaggccaaggtgggtggatcacttaaggtcaggagtttgagaccagcctggccaacaaccctgtcgctactaaaaatacaaaaaacaaaacaaaacaaaacaaaaaccaggtgtggtggtaggtgcacctgtaatcccagctactcgggagcctgaggtgggggaattgcttgaactcgggaggcggaggttgcaatgagctggtatcacgccactgcattcctgagtacatgcctgagcaacagagcgagactctgtcttaaaataaataaattaattaaatcaaatgaaaccagataaagaaagaagatccccccaaaaattagagcaaatcaaatccagcaatatatacaaaggataatatgttaggaccagccagagatcaccccaggaatccagagctagttcaacattcaaaacatcaatggaattcatatttacagcttaatgaggaaaaacagtgtcatctcaacagaggcaggggaaacaagctccaagagtttctgtcattgttttgatgagcagccacggaaagcctcaaccctgctctgtcttggctgatgccaaaattactgaagacaaaatgtacggccttgaaaacaccacagagtaactcatctaatataacggcctaatgtttatttcaactaaagtaatacaatcaaaagatttttggaaacgattttggataaaggcaaacatttttccctgaaaggcagtcaagataccccgcatcggccatcggagctttgcctccagggtcttactcgggtgcccatattacacacagggacctgtgtcccctgccccaggtctctcagccttctgaatacaagggctttgccttcttgaggaccacccttaggtgggctgcactcgatacttcataaagctttacacccctcatctcattctggtcttcaccataaccccctcactgtccccattcttcttgacaccaacaccaagctggagacatcatcactcacccgctctggtgagcaggtgattcgctatggaaaagggacctgagacctgggcatgtgcccttgctctgaggacctcagtgtgctctgccagcctgggtgcccgcacccctaggccctactggagtcatcttctgaatcctggaggtgccccggcctgtggacagcaagatgcagaccctgctctcatccatctgccaccccactgccttcaggcagctgcccagctgaggagcaaggctccagaatcctgacagggagggcaacaaggagcaaaagggccttagtcagtggggctgcagcgggcacactcctcaccctaactcctcagcccaatggctgattctttgggttgtttgtttttgttttgagacagagtttcgctcttctagcccaggctggagtgcaatggcgtgatatcagctcactgcaacctccacctacggggttcaagtgattctcctgcctcagcctcccgagtagctgggattacaggcatgtgccgccacgcctggctaactttttatatttttagtagagatgggatttctccatgttggtcaggctggtctcaaactcccgacctcaggtgatccacctgctttggcctcccagagtgctgggattacaggcgtgagccaccgtgcccagccccaacagctgatttttttttttttttttttaaaaacaaaagcaagattctgtacctgctgaagcaggcccagaaaagagctggtggagggcatggtacccagagcagcactgtttggtatgacatggcagccactggtcacaggcagtgccacaagcttggaatgccacaggacaaaatatgtctgatatatattttggtaacaataaaatatattgtcaaaattatttttctatttctttgctattttccatttcttctcactaatttaacatggctactagaaaggtttaaattatgcatgtggcacacgatgtttctactggacagcacagcagcacagggctagcaccggagatcctgcagctcagacgcccatggggtgaacaaaaaccttgcaactctcccaggccagggactgacatattttaaaaccggagattttgattgaggagggagtagagctaccacataagcaaatatgtaatgttgtatgttgtatgtttctttctttctttctttaagaaaaatcccttggcaacaggaagcttaactgcaccaacaaggacagcagaagaaaagcagaatgttagtcaacaagggtcaccctgacccgaaccccagccccagctctctccagctgcacagccctggggagaaaggagaaagagcagagaagcccacccctcacacacccggttagtctcccctgcccactggcaggccctggggcaggcccctagatgggtctgcaaagggacactgcccccttgcattctgcccccccttctacatggctcccccacccacccttctacacggtggcttctgagggcagcccctggaggtgatcatgaccccccatcttgatctgaggattaacagatacaggttcacctggtgaaaatgcaggagctgtaggggtaggacccatcactcatctgactgcatgttgtaattcaatggacagtttactaaagtaatagtcttcttcctgtcctctgctgagcacccatctggccaacggtcctgcgctccctcagggccagcggcccatctcctcctgtgcctcctggagggcttcgcaactgcctccctcctctggggaatcttgccccactgactgacctttcggctctcagatcccaggtccctccctcgcagatacggcaacaggctctcttgggatttcaatcccgccttcccatcagctactcttcaaaacactaactggtattagctccttcagagaactctctggctttccaggcctacaatctccctccctagaatgaaagctcagtgacagaagtgcccttaaacttctgagtgacacgaggccctcagccggccctgaatcaatactggctggatcagtgagtgaataaatgcacatgtgagtaaggaatgaagggagcgaaagaactggattagaagctgcttggggcagagatgtgccttacaggcttcatgaagagtgggtgatgaaaaaggtaaatggagcatctaagaggaagctttgatagaagggagaatgcaagagaggttggaaattggaatccattggaattgggagcctggggagatgccaggacaggcactctctggcctaggactctgcagagggcagcctcagcaggcaagccaggcccccagcttctggggccggtcgcacccattatggccccgaaacggctgggtggtggtctgcagcctgcccagggccggctgggagacaggcagggtccccaccactctcttgcctctgggcaaaagctggcctcctgaccctgggggatggacgggagcaggggccacacaacacactcccaaacatataatcggcctccttcaccctcgcccacgctcagtcacacacagcctcggtcatacacactcacactcactctccggcacactctcagagcatcacataatttcagtgagacacaatcccaaagactaacacggacaacctctgagtctcacacaatctcagggccacacacaggcacacaatcagacgagctcaggaacgcccccgtctctgacacacgcaatctgaggtttacacgcgcgcgcacacgcacacacacagacaccagccggcgctcccgcacgcggctcccccacccccgccacgccacgcccccattgcctgggaactggcggccccgccccgcagcgtttgaggcgccgcaagccttcacgcccctcgggccttgcagatccctctcccagtttccgcggcggtccggtgcggtcagtacctgtctaaaatcaatattgccgaggcctccgcagcagtcaggccctgccaccgagctgttcgttacctcggctcccgggttcccagatctcttcatccgggggccgcctcaggaggcaccacgcgggccccgctgcagccacgcgcccccggaaccggacctatagagccgggtaagtgccgccagtcggggcgctttcccggtgacccccaacatattccggccttctgggaaatgtagttccccgtcaccgcgaagtgcctctttatctgggggctcgcgacagcgtctagaggagccgagaactacaagtcccagtgtgtttcgccgcagagcctgccggttccgctgcagctacgtagcagtatccccttggatccggcctcccgcccagtgcctttggtcgccggctgccgcacccgagcctgtaactgacctggcgtccctgcccttgcctggcggcggtggggctagaggccgggggccgcgggtcgtagctataagcagcttcccgcgcagcctcctgcggacttggacttggcccgggtcacacacgcccagggccccacacgcccagggccccacgccctcttctgaaattcgctttactctgggggcggtgcgcgacgagcactgcctagagcttcccgcccccgcggcgcccaggctctttagctcggccaaagacccctcctccactcattttttccttcattcattctctcattcactctcgagtattttctgaaccagactgtgcgctgagggtacggtagggaacaacacagagtcccccgccctcgcttcctcctgactgagataaaagacaaaatgtgaataaagggttataatatggatgagtactgtggtggaaaaaacggggtgggtcaaatggtacggaaggatgctgtcttagaatgtgcaggggaggtgccagatgtgccaagtgtgagggcagggcaaacaaggcaagacgaatggtatgtacaaaggcctggagacaggacgggcacctaaggaacagagaaaagaccggtgagctgtggagtagtgatggagggggtcaaatggagaagagtttagacgatcgggtcccagaagaaccccttttgtaggccgggtgtggtggctcatgcctgtaatcccagcactttgggaggccgaggtgggcggatcaccagaggtcggcagttcgagaccagcgtgactaacacggtgaaaccccgtctctattaaaaatacaaaaaatagccgggtgtggtgcgcgcacctgtaatcccagctactcaggaggctgaggcaggagaatcgcttgaacccaggaggtggaggttgcagtgagcggagatggtgccattgcatgccagcctgcgcgacagagcgagactccctctcaaaaaagaaaaaagcccttttgtagccaggtgttatgtaatatggggaaatagactgagaggttccaagatttgctcagtcacccagactgctgggggcccagacaggacttctgcagtcagctgcttcctgctccagatggcccgtttctctccaccttggcccacagcacctaccagtgttgagcatttactgagcagccactgtgtgctgctttagaggtagtcccaatcttcacaacatcgctaggatggggcaggccaaccgaggagacaggaaagacactggctttggagcatgcactatctctgtgactgagcccaccttcattttcctcaaaagtaaaagggaaatacatgttggtaaaactcatcacccaggaactggcctgtgggaagtgctcagtaggcattggcccccggcagggctggggacacaggctcagggctggttctctgacttaccactgttactaatgagtgtcgggaccctttccctgctcagtgtccaggcagagctgctagaggcagagccatttctgaaggagccccccgcagcgggagggcttctagcaagtctttcccctccgcctaccacacatccacttcactgatgttccagtcttctgacctaactggtcactcctgttttgttaagcccagaaaacaaatttttgtgcgtttgctttatctgagaacaaagtaaggcaaccgtaagaggtcacaccagaactgatgcagtccgatcctctactccagcctacccaacctgggccacccttcctctgtgaaaagcaaacaccccacccaggagacagacttgcagcttgaaacaagtcagataaaaacctcctgcctggctcacacctggaatcccagcactttgggaggccgaggcaggcggatcatgaggtcaggagttcaagaccagcctgaccaacacagtgaaaccccgtctccactaaaaatacaaaaattagctaggcatggtggtgcacacttgtaatcccagctactcaggaggctgagtcaggagaattgcttgaacccaggaggtggaggctgcagtgagccgagatcgcgccactgcactccagcctgggccaggctgggcatggtggctcacgcctggaatcccagcactttgggaggccaaggcgggcagatcacgaggtcaggagttcgagaccagcctggccagcatggtgaaaccccgtctctactaaaaatacaaaaattagccaggcatggtggtgcacacctgtgatcctagctactaaggaggctgaggcaggagaatcacttgaacctgggaggtggaggttgcagtgagccgagattgcaccactgcactccagcctgggcgacagagattccatctaaaaaaataaaaataaaaaaccctgccaaagatactttggggcacaagtacttgcctgagcctttcaaaagttcccaagtctgagagcttgtagagaaattatccaggccaacctccctcactgaaacattccttctgtggcatcttgggcaaatggaaaagttggttctgcttacgtgccgccagtgatgagaggttccccacctcttgaggtcgcccgctccactgatggacaggggtccattaacccaaagtcatgatacccattaacccaaagtcacccttcctgaagctttaacaaacaaaagttcctttctaccttcagggttatctctctttgccccttgattgagctcttcagatataggaaaccatttatcatggaacagctcccagggcaaacctcctgatggcctctcttttctctaaccccacctccctggctcctgaattatgaatcaggctgcagaaactcccagcaatcattaaaatggggttttagtgctaaaattaacatgtgtttattgggtgcctttgggtaaaacctaaacctttccctactctgaatctattttctgttcataaaacataataatatttatatcatagaatatctcttgagtataatatctcgagtgaggctgttgtgaggattagaggtaataactcgtacaaaagtgcctggcatacagtgggttctaagaaaatgtccaggccaggcgcagtggttcatgcctgtaatctcagcactctgggaggccaaggcaggcagattgcatgagcccaggaattcgagacaagcctgggcaacatggcaaaaccccatctctacaaaaaaaaataccaaaaaaaaattagccgggtgtggtgcacgtgcctgtactcccagctactcgggaaactaaagcggcaggatcacttgagcccaggagagagagacttcagggagctgtgattgtgccactgtactccagcctaagtgacgagagtgagaccctgtctccaaaaaaaaagaaagaaaaaaatgtttctctcctttctatataattgagatctggtggttaaggtcacactcatggacatgctgctgggatttaggacaccactgggggccaggagagctggctgacagctcagggacctgccagagttcctgggaggagatgggtgggcaggggccaggatgggtggccagagctgctccccagacagcaggtactgcaggttatcagaaaccatattgtcactgggagtgctttaaaaccaggaaggtggtgaggggctgtggccgcaatgcccagcacccacttcatagactcaggcctgattgccctcattctacccctggtggctccaggaacaagagggtagccagggtgggaactggggcaggggagaggtcatctggagatgtgtgccctgatcacgagttccctccccactcccatctgccctgagctttggaagaagccccttccccaaggacctactacttgctgggaagagggcacgggagtgaagttacctgaacccagttgtccacagcctaggccagcctgggaaacaccagcaaggatgttggtgctggcagggcctcactgcccctcagtgtccacagtgtccacagagcacaaacccctgccttccagctggcctccagaggtcctaaacaccccaggtatacacccaccacagggcattttcatgtgctatgtcctccgcctgggttgctcttccccgcatttcctcccagtaccctcctcacctcctctgggttctgctcaagttccacctctccaccctgttgaacatgctgacttccccatgctcgccatgggcctctcccaactttatttctctccattggccatatcatttaacaaatgtatttagtgcacttatttattttgtatagtgtcattccctgtccatcccctatcccctataaggggaacttcaccagggcagagattttttgtttgtttgttttttgagacggagtcttgctctgtcgcccaggctagagtgcagtgacgtgatctcggctcactgcaacctctgcctcccgggttccagcaattgtcctgcctcagcctctggagtagctgggactacaggtgcgcaccaccacacccagctaatttttctattttttagtagagacagggtttcactatattggccaggctggtctcaaactcctgacatcaggtgatccacctgcctcagcctcccaaagtgctgggattacaggcataagccaccacccctggcttttttttttttttttaagagacccctgggtttaaaatcctgggcccaagcgatcctcctgactcagtctccggaatagctgagactacaagtgcatgccaccatgcccggctaagggcagggatgtcttttttttgagatggaatctcactctgtcacccaggctggagtgcagtggcatgatctcagctcactgcaacctcccctccaccccgggttcaagtgattctcctgcctcagcctcccaagtagctgggattacacgtacacaccaccatgccctgctaatttttttgtacttttagtagagatgaggttttgccatgttggccaggctggtctcgaactcctgacttcaggtgatccgcccgccttggcctcccaaagtgctgggattacaggcatgagccaccatgcccagtcctgagggcagggatttctatctgtttgtacacagccctgtcctgggcacctagctctggcacaaagcaggcattgaatatacaatgagtgaatgaatactgtagctctgccactctgagttgggtgatcttgggaaagccacttttctgggcctcagtgaccgtgtctgtggaatggggagggtgaccaagtctgttacctaaataagagaccaaacccacctattaagattgaagttcggccggttgtggtggctcacgcctgtaatcccagcactttgggaggccaagacgggtggatcacctaaggtcaggagtttgagaccagcctggccaacatggtgaaactccgtctctactaaaaatacaaaattagccagatttgatggggggcacctgtaatcccagctactaagggaggctgaggtgggagaatcacttgaacctgggaggcgaaggttgcggtgagctgagaccataccattgcactccagcctgagcaataaaagcgaaactctgtctcaaaaaaaaaaaaagattaaagttcctggctgggtgtggtggctcacgcctataatcccaacattttgggaggccaagatgggtggattgcttgagcttagtagttcaagaccagcctgggaaacatggtgaagtcctgtctctacgaaaaaaaaaaaaaattagccaggcatggtggcgtgcacctgtagtcccagctactcaagaggctgaggtgggaggatcacttgagcccgggaagttgaggcagcagtgagccatgatggctcactacactccagcctgggcagcagagtgagaccctgtctcggaaaacaaaacaaaacaaaacaaacaaaaaaacaaaaaaaaaacctaaacatggaaacaatagctaatctgtctgagctcttgctggctgcaggccctgagctcagcacttgaagcacacattttctttaagcctcacaagagccctgtgaggtagggaatgttattctgactttccagatgaggtaattgactcatgtggaaggtactggcccacagtcacacagctgagtgtcagagttgaaacctgtggtctgatgaaggcaaaacattcttccttacaatggccctgaggtcctggatggtccgggcccaatccaccttcccagctcttcttgccctctgtactccagccacactggcctctttgaggttccttccagccacagggcctttgcacctcctgttcactctgccaggcacactcttcccttctcttcttggagatcaagaatggtcccctcatcgtctgccctgcccacctccacatcccctgccagcagccagtacacacctggcacccagatggcactgggtgaatatttgctgaatgaaggaggtcagaattgaatttaagtcccatgaaaatatacttcaaaaatgaaggtggccgggcgcagtggctcacctgtaatcccagcactttgggaggctgaggtgggcgaatcacgaggtcaggagatggagaccatcctggccaacatgatgaaacccatctctactaaaaatacaaaaaaattagctgggtgtggtggcatgcacctgtagtcccagctacttgggaggctgaggcaggagaatcacttgagcctgggaggcagaggttgcagctgagattgcgccactgcactccagactggtgacagatcaagactccgcctcaaaaaaaaaaaaaaaaaaaaaaggaggcaaaaaggctgggcacggtggcttatgcctgtaatcgtagcactttgggaggctgaggcgggcggatcacctgaggtcaggagttcgagactagcctggccaacatggagaaaccccatctctactaaaaatacaaaaattagtggggtatgatggtgcatgcctgtaatcccagctacttgggaggctgaggcaggagaatcacttgaacccaggaggcagagattgcagtaggccgagatcgtgccactacactacagcctgggtagcagagcaagactctgtctcaaaaaaaaaaaaaaaaaaaaaaaaagcagaggcaacgtaaagctattttcagacaaacaaaggctgagagaattgatcaccagcaggcccaacctgaaaagaaataccatgggcgggttctgcaggcagcaggaaaatgatcccagttggaagcccacgaacacaggaaggaatgaaaaagacacatacgtgtaggtaaatctagataagtattaggtgcttgtaaaaataaaataatcttgtggagtttaaaatatttaccttggtaattgagagaaaaggcagaaaaaaatcggtaagactatagatttgaacatgattggcattcatagaactctcctcctagcaactgtagaatgtaccttcttccccagttcacactgaacattggccaaaacagaccctatgctggggcataaagccaatctcaacagatttcaaatgattgaaatcatagtttatgctcttttttttttttgagacggagtttcgctctttttgcccaggctggagtgcattctcggctcacagcaacctccgcctcctgggttcaagccattctcctgcctcagcctccggagttgctgggactacaggcatgtgccaccacgcctggctaattttgtatttttagtagagtctctcgagtagctggtgggggccaccacaccgggctaatttttgtatttttaggtgagctggggtttcaccatgttggccatgttggtctcgatcttctgacctcaggtgatcggccaacctcagcttcccaaagtgcagggattacgggcatgagccaccgcgcccgtcctgccttcaagtcttgaatgctgctctttccccccttcctgtgcacacccctgtggagcagttttccactctgtggtaatggcctgcttatgccctagccgcttctgagccgccacggcagggactgcttgttattgtttattcgcacagcactctgtctgtccgagtagcactaagttggcactcaatgcttcatgcctcctcctgaccccagccctctatctgtgagattaaatgggaaatgctatcttctcatacagtctggtcacctgcccctcccctggccactgttgcttgagtagagttggtcacctgacccaccctgagccagtgatagcaccccaagccctggcccccattgctggtccatggatgacacctgacccaggctggaccttgtttctggggttgaaaaaaatgtattgtctggcccgtcgtggtggctcacacttataatcccaacactgtgggaggctgaggagtatggattgcttgagtccaggagttcaagaccagcctggacaacatggtaaaactccatctccacaaaaaatacaaaaaaatttagccaggcattgtggcaagtgcctgtagtcccagctacttgggaggctgaggtgggaggatcagttgaactcgggaggtcgaggctgcggtgatccatgattgtgccactgcaccccagcctgggcaacagacaccctgtctcaaaaaaaagaaaaagtattgtctagtttgcaaatattggaagattttttttaaagttatcatcttgttttccagtttaatcccactatgtttaagagcataggccgggcgcggtggctcacgcctgtaatcccagcactttgggaggccgaggcgggcagatcacctgaggtccagagttcaagaccaacatggccaacatggtgaaaccccagctcaactaaaaatacaaaaattagcccggtgtggtggcccccaccagctactcgagagactaaggcaggagaatcacttgaacccgggaggcggaggttgcagtcagccgagatcataccactgcactccaggctgggtgacagagtgagactccatctcaaaaaacaaaacaaaacaacaaaaaagacctgaggccgggtgcagtggctcacgcctgtcatcccagcactttgagaggccaaggcgggcagatcactgaagtcgggagttcgagaccagcctaaccaacatggagaaaccctgtctctactaaaaatacaaaattagccaggcgtgatggcgcacgcctgggaggctgaggcaggagaattgctacaacccaggaggcagaggttgcggtgagcagagatcgcgccattgcactccagcctgggcaacaacagtgaaactccatctcaaaaaaaaaaaagacttgaaggcagccctgattagagctaaggatggggtagggcctcaccaaaaactctttccttccagtggcacatggatctgcttaatgttgaagtcttgtttaggattaatccctcagggttgaccctggaagcacagaaggacagccaagctgctttctaaagctcagtgcctgcagaatagtacagttcccatttccctgcatactcaccagcacagagtattagtccaaaaatgtttatgttacttcaaagttgaaaaattagttgaaaaatgttatttgcctctttcccacatcattagtgacgttttcgcatgtgcttttcatttaaattagaatagtgctttatttgcactacttaccaacacaacttctctttgtgcctttttttcaaaaacacccatggatcttaagggccgggctcggtggctcacgcctgtaatcccagcactctaggaggcccaggcatgcggatcacaaggtcagaagatcgagaccatcctggctaacacggtgaaaccccgtctctactaaaaaatacaaaaacttagccgggtgtgatggcaggcacatgtagtcccagctacttgggaggctgaggcaggagaatggtgtgaacccaggaggcagagcttgcagtgagctgagatcacgccactgcactcctgcctgggcgacagagcgatactccatctcaaaaaacaaacaaacaaacaaacaaaacaaaacaaaaacacccatggatcttagtctttgcagtctcttgaatttattaatttaaatgaattggactgttgtaatgtttaagcgatacttaaaagtttttaccttgccgcgcaccgtggctcacgcgtgtaatcccaacactttgggaggctgaggcgggtggatcacctgaggtcgggagtttgagaccagcctggccaacatggtgaaaccctgtctgtactaaaaatacaaaaattagggctgggcatggtggctcacgcctgtaatcccagcactttgggaggccaaggcaggcggatcatgaggtcaagagattgacaccatcctggccaacacagtgaaaccccgtctctactaaaaatacaaaaattagctgggtgtggtggtgcatgcctgtaattccagctactcgggaggctgaagcaggagaatcgcttgaaccagggagttggaggttgcagtgaactgagatcctgccacggcactccagcctggcaacagagtgagactttgtctcaaaaataatataaataaataaataaatatataaataaataaataaaattaaaaaaaataaaaatacaaaaattagccaggtatggtagtgggtgcctgtaatcccagctacttgggatgctgaggcaggagaattgcttgaacccgggaggcagagattgcagtgagctgagatcgcactaccgccctccagcttggggcacagagcaagactccatctcaggggggaaaaatgtttttaccttgaaaattttccaacccaacaaaaaattgcaagaattatacattaaacatcctatatgtgtcacctagatttgttttcagcattttctggcctttgctttatcagtttctatacagtgatttttttttttaatgaactatttgagggtaagttgcagactctttgcccctaaatctccaaagaacaaagacattctcctatgaaaccacagtactgtgatcaaaaaatcaggaagtataccattgatacaatggtgttagctaatgtacagtccatattcaaatttctctgattgatctgacaatatcctttaccgtgcattttctcctcagatccaggatcatgtgctgtctttagcaggctgtgatctggaacactccttagtctgtctttgtccttcaggagagacattgacatttttggagagcacgagcagggtattttgtagacggcccctcaggtgggtttgtctaaggccacctcctgactcactgcaggctctgcaagaatgtcacctgcgtgctgctctgtccccggtgcctgtggtgccatgtcacggggagctgtgattgctggtgaacagcaggcgtctcctctgcaaaggcatgtgaggttttgctattttctttgctctgaatgaccactgctgatgtgatgttcttattgatttgtcagactcgtgaggcgtttaaagcccctctcaggagggccgctcagatgcagctgggtctcagcaagtgtccgagactgacggaggggcaagctgtcatcccagccctggctgcttggtcgatgcgtccttgttaatgctgacatccttgcctccctcctgacgccaggcaggagagaggctctgtgtgctctgagatcgaaggctaaaatcacctatgaatgagtcaacagcccagctgcagcagactccctgaattcatgtcagacccaaggggataacccaaaaggagcctctgggggagggctggggagctcagagccgctgcagatatgctcccagctacacctctccagtccctgcctcttcatctgtaacaggaagtgcctggcttagatggtgttcaagtgtcttgatgagggcaggtggcatctgaatgggacagttctttgtgtgcaagtggtctcgcaaagtgcaggatgttaagcatccttggccctcacccccaacccaaaacaccccacaaccatttccacaaggctccaaggagggtgttgtggcccccagctgagaacagctaggtgataattactaatctctgctactgtgtatggaagacatcttgtgtgctggccttgtgccaagtattaccccatttctactttgtaacaatccatattacagatgagaaaagtgaggcccagaaaggctaagcagcagccaggtagggttggagccaggacgctggtcccagtcagcccaactctgtggcccatcccattcacctgtgcactcatggaggtgatgccacatgtaagttgtgaccccaggttcctgagttaagcctgagtgagaggttaatatggccccccactcccctgtcaccacgggtgaagcatgctgccctatgccattgacattaggttggaccatgtggcttgcctcggctcacagaatgagaatggacaggacatgtatgtgcttgtgcaatttgctttggtttcttttgctccagtgacataccatgagaagcatataccctgggtgactgctgcctctttagcctggggcccaaaacaagcacatatgggggacacccaagccctgcctgggctcactggactgtggactgaagcagctgcccaacccagcccagctgggttagatcagtctatccacactcaacctgcagactcatgtgcatgagcttacatatttattgccataagccactgcatttgtgacggtttgttatgcagcattactgcagcaatagctgactgatagaaccgtcctggctcccaggaccagcttgaccacttactaaacgccagagcatgggcaggtggttttgcctcagtagatctttgtttccccatctgtataatggtacagtaatagtactgacctgcctgttatgaggattgaaggtgatcacgcttttagtatagtacctggtatatagaaagtatttagtaaatgttagttattcattgctaccatcagcaccactattactattattgttaactgtgccccttgggatccagcagggagccgtcacctctactctcaaggattctgacagtctggagttaatgaatgggagaggactcagcccttcacagaggtggccccagagcaccttgccctagtcccagaggtgctccctgcccctgactcactctcgccagggcccactcaccctcgacctcaacaagcatctagaatggactgcttggcaccagatggccaagtgcctcacagggagtcccggatgggtcaaagtgacccaaagtccacaggaaacccaaagccagccttgcctctcctgacaggttcaccctccttcagcccaggatttattacgtaaccaacacttttagcaacaagccggagcccggcaacagggcccaccccctagtgtgagagtgtgagagtgtgagcgtgtttgcgactgtgtgtctttcagtgtctgtgtgtatatctctctgtctgctttattgtgtatgttgccgtatggatctgtgtctattgcagcatgtatgtctgtttcagcatgagtgtgtttcagcatctgtgtgagtatgcgtgtctgtttttcagtgtgtatgtaaatgggtgtggctgtgtttcagtgtgaggacagttgtgtttcgccatgttggacatgaactcctgacctcaggtttcgccatgttggtcatgaactcctgacctcaggtgatccacccacctcggcttcccaaagtgctgggattataggcgtgagccactgcacctggtccttcattcctttttaaggtccactaacattccactgtaggtacacaccacgttttgtttatccgttcttcagttgatggacatgtgggttgtttccactttcgtgctattgtgaataatgctgctgtgaacatttcatgtacaagcttttcatagacatgtgttttcatttctcttgggcattctctaggagtgacattgctgagtcacatggttactctgtgcttaaccttctgaggaactttcagactgtttccaaagtggctacaccacttaacattcccaccagcaatgcacgagggttccaactgccccacatcctgcccttgtttttgtttgtttggttttggctttggctctttgattatagccatcctcaaagatgtgaagtcttattgtggtttgatttgcatgtcccttatggctaatgatgttgagagtttttcccgtgctattggccatctgtatatcttctttggagaaacgtctgctcagatcctttgccatttttaattgggtcatttgcctgtttattccaagatgaagtgggactacacatcaggaggggtttaaaatggaatgctggaaaccacagcttctcaaggttgtctcctgtctctgggggagacccagtcttcgcgtcccagaggcacccccactgcgagtccctccagcccttcatcccatagtcctactccactccatctctagggaaaacgtcattccatctccctaggaagtcgcttccaggcaaccccaaggcctttcctttatggaatcaagggctctttaaagtgtttttctaggaaagatctgctcttgctccaaacatctgtgctgctgctgttgccttgtatgtatgcgggaatagctaaagccagttccttggaaatggaactacatgctttttcttccagtcactacacataaatgacttctacttttccacttcctagtcagacttctccttcagactctgaactctatccacccgctggactcctctgaggagctcttacaggcacctcaccccatctcctcctactccttcccctccactccctatttcttgaccccagccctcccccatcctaggtcccagtcaccctaaccagacatccaggcgccactcagacccctccctcttgctccctgtcacgactaatcagtcatcgactcccgtaattgttcctctgaaatagcactgctcaggcttcatcagctggcacctggacaatccagacagctggctttctcaagcttccatcctttccaaagcaccctccacccaggagcaggtgactcccttgctcaaaaccttgcaatgactccctactgcccaaaccaaaatcccatcttcccaggctggtgtatgagacccttccatgaatcagttctttcatttattgatttgctcattcattcaattttctgagcatctactatgtgtgagagactggcaagcgtctactgagcatctaccatgtgtgagacaagccaagcaggtgaccagtgggacagtaggggcctgtgggggacaatggaaacagagaggaggggaccaaatccaggagaaggtggtcaccctgtacccaccccaactccagccatttaaattatctccagttcccagaatgcaccatgctctttcatgtctggggaactttgcaaacccactgaaaactcttctcctgtcaccctttttgcaaactccttcaagccttcacaacctggttgaactgtcttgtcctgtgcaaagcctccccccaatgcagagttgattctgtcagtcctgcctttgagcccccacagcctagcagagacctcattacaatgttgatctcatccagttactgtttttttggttttgtttgtttgagacagagtcttgctctgtcactcaggctggagtgcaatggcgtgatcttggctcattccaacctctgtctcctgggttcaagcaattctcctgcctcagcctcccaaatagctgggattacaggcatgcaccaccacacctggctaatttttgtatttttagtagagatggggtttcaccatggtggccaggctggtctcaaactcctgacctcaagtaatccatctgcttcggcctcccaaagtgctaggattacaggtgtgagccaccacacctggctcattcagttattgttttaactatgatgatctttatggaaaatgaaatgccgtgttggttttactttctgatggtacagacacatcagggaaccacaagtgcctctcccccaactccctgcacctcccacctccaccaaggagaaagcaatttttcccatctaaacttctggcatgtgctaactctggttctcaagcagggctgatttttttttttcttttgagatggagtctcactctgtctcccaggctggagtgcagtggcgtgatttcggctcactgcaacctccgcctcctgggtttaagcgattctcctgctttagcctcccaagtagctggggttacaggtgcacgccaccacgcccggctaattttttgtatctgtggtagagatggggtttcaccatgttgaccaggctggtgtcaaactcctgaccccctgatctgcctgcctcggcctcccaaagtgctgggattacaggtgtgagccactgcgtggggctgattttggcacacacacacacacacacacacacacacacaccctagggacattcttcaaagtctggacacacttttgattgtcacagctgggtggggatgggggtgctatggacatctagtgggtagaggccaaggaagctgctaaaagtctacaatgtgcaggggccggtcgcggtggctcacgcctgtaatcccagcactttgggtggccaaggcgggtggatcacgaggtcaggagatcgagaccatcctggctaacacagtgaaactccgtctctactgaaaatacaaaaaattagctgggtgaggtggtgggcgcctgtagtcacagctactcgggaggctgaggcaggagaatgacatgaacctggggggtggagcctgcagtgagctgagatcacaccactgtactccagcctgggtgacagagcaagactccatctcaaaaaaaaaaaaaaaaaaaaaaaaaaattctacaatgtgcaggacagccctcacaaccaacaattatccaacccaaaatagaacagtgccaaggctgagaaactgtccaaattataggtggaaatatagttgtgtgtgtgtgtttcggcattagagggcattcccgggcctaggtgggctctggagatggcccatgctcaggtttttatgccgggaaggtgcaggtgcatggaggacattggccagctgggctgtgaggaggagctgtaggcaggtgcttgcagagatgaagaagggagccctcggtctggctgaatccctggatggatcatggggcctgtgggctcctcaaggggaggagacctgccctcccttgaatccaagctgggagatggtggtgcctcccaggagggtaagtgggcacctcgctgccttccacctctgaagggccaagtggtgcccaggatatccatgttttggcttcttcctgggcacatgtggagactccatttcccagggccccttgcaggtaggtgtggccacatgacaggttccagccaatggagtgtgataggaagtaatgtcaccactccaggcctggccatggaattctcgcaccacccaggctctctccttcccagtagtatcctagctgagccagaggacgctgaaggcctacagggcagcagagccacagacggaaggagcctgggtgcttgagtgactatgcagcctccccggcctgccatcccgtctggttggactgtgacatgaaacagatgtgaaatagatcttcatcgtgtagagccgtgggccttcgagctttacttgttacagcaactaattttatttaactaatactggtgggtcagcaggaacgtccaaggtgaaagacaaaattccccttcagtttttcagggctgtttaactcctaagatccagggctgatccttaattattccaccctcctcgcccaccccattctccattagactcttgtagtttttgccaaccttggcaagtggggccttgagtaggccttaatttgatccttaaaagtaaagggatttcttccaccctgagagttgtgtgatagtttgtaccagttacaaaatttgtgttctttttcttgatggactgtgagccccttgaggggaaggcctgggcctgatttgcggatgtcacaaaggcccagtagtgggctgggtaggcagcaatcttgaggaactatttgtggaaatctctgagcatgtgatgcccctgattggccagatcattctgcctttatggtgtttggtatggttgttttttttttttgagacccgggtctcactctgttgcccaggctggaatacagtggtgcagtcacagctctctatagcctccacctcctaggctcaagcacttctcccaactcatcttggaatacagtggtgcagtcacagctctctatagcctccacctcctaggctcaagcacttctcccaactcatctgggactacaggcatgcaccaccatgcacagctaatattcttatttttttttatagagatgggagtctcgctatgatgcccaggctggtctcgaactcccgagctcaagtgatctgacctcccaaagtgctggaattacaggcatgagccaccgcgccctgtcttcctttgtttgtgttgattacgaatacattcacttgcaaaaaataacaaaaaaaacccccagaaaatccgatcaacagagacgtaaacaaataggtgtttcgttgtgtgtgtgtttttttgtttttttttgtttttcatggaacacaagctcgaagcaggcagttgcaagcatgagggaacttgactttgccatccctatactgacctttttattctgatgcttcggcctcataggcacaagatggctgccatagctctaatcatcacactggggctcgaggcaagcaaaggtgagagaaatgtctagggccatgctaactgtatctgtctcttcatcagggcagcaaaagcttttccagaaatccccccagcagacttccactttaagagtgattggcctgaattgggtcaaatgtctagtacaagaggctaggaagttaaaacagtcatgattggcttagaacactgattcacaaatgaatctgtaggggtgggttgcccctccacacctgtgggtgtttctcgtaaggtggaacgagagacttaggaaagaaaaagacacagagacaaagtgtagagaaagaaataaggggacccggggaaccagcgttcagcatatggaggatcccgccagcctctgagttcccttagtatttattgatcattcgtgggtgtttctccgagagggggatgtgtcagggtcacaaaacaatagtggggagagggtcagcagacaaacacgtgaacaaaggtctttgcatcatagacaaggtaaaggattaagtgctgtgcttttagatgtgcatacacataaacatctcaatgctttacaaagcagtattgctgcccgcaggtcccacctccagccctaaggcggtttttccctatctcagtagatggagcatacaatcgggttttataccgagacattccattgcccagggacgggcaggagacagatgccttcctcttgtctcaactgcaagaggcatgccttcctcttatactaatcctcctcagcacagacccttgctgtcgggctgggggacggtcaggtctttctcttcccacgaggccatatttcagactgtcacatggggagaaaccttggacaatacctggctttcctaggcagaggtccctgcggccttccgcagtttttgtgtccctgggtacttgagattagggagtggtgatgactcttaaggagcatgctgccttcaagcatttgtttaacaaagcacatcttgcaccgcccttaatccatttaaccctgagtttgacacagcacatgtttcagagagcacggggttgggggtaaggtcatagaatctcaaggcagaagaatttttcttagtacataacaaaatggagtctcccatgtctacttctttctacacagacacagtaacaatctgatctctcttgcttttccccacatgaatcttttttttttttttaagcacaaagggaataggtattaggaaagcaaccaatagtgtctgccttgatttccagtcctgtatctggggcttctgccaaaagtcctttctcctagggccaagagggcccaggcccgtcttctcgaggctaccacacctggttttccccatacctgagagtatgtgaggataaaacagcagagcatccaagggtctgttgcccaccctcccaccttgcctgctgccctgtcctggtgcttctcaggaagccttcggggtacccaccacaccttgtccccatgccctttcccagtagacaccatcccagccactctgatgaagctggactctgtccccaggagatggaaagtgagccactctcccagcagaggcacagggtcagtgtgttctgcagaataaacacagtattcctagttactctcatctgagaagctgccacatctccctaaacccctggccttcccacatgatctgaaaataaccactgatactcacatatagaatccagaattccgaggaaatggaattaaaaatagccagaggaagaaggacgtgccccaggcagatgacgtttagccaaacatggaaacaaaggatgagcctggggcctgggaacaggataatagtagccaacatgtgccaagtgactactgtgtggcaggtactgaatggagtgcctggcaggcattgtattatgggtccctcaagtcagccagaagaggtaagtactgttaccactctcattctgcagagagtgaaacaggcttagaggggtaatgcctagagtagcatccagaacgtgagctctggtcagatagggtttgtttctcagtttagtcattccctaggtgtaatgtgtttaggcctcagtttcctcatctataaaatgggtaagatagtagtagctacttcataggctcactgggaaaactcaatatgagtcatatatgtaaagtactcaaaaccagatctggcacgaaataagccctggatgtatgtgtgcaaatatcatacccattttatagatgagggaatgaaaaattgcagataactatgcatttgcccaaggtcacaaaaccagtaaaaggtagagctggccgggcgcggtggctcactcctgtaatcccagcactttcggaggccaaggcaggtggatcacctgaggtcatcccagcactttgggaggccaaggcaggtggatcacctgaggtcagaagtttgagaccagcctggccaacatggtgaaaccccgtctctactaaaaatacaaaaattagccaggcttggtggcacatgcctgtaatcccagctactcaggaggctgaggcaggagaattgcttgaacccaagaggctgaggttgcagtgagctgagatcgcactccagtctgggcgacaagagtgaaactccgtctcaaaaaaaaaaaaaaaaaaaaaaaggtagagctgggactcaaagccaggtccctctactactataaaccacccaccagtcagcgtgactccaagtggcacaggccactgggttaatgggcaggagaacaggttctatacacaccaggcagtccagtgggtccccttgaggaccacaggcaaagccaatgaggagtttcccttgccccgagtgccctgtctctcaccttgacctgtcaacataccacccattcttgagcgctgggagagaagcccccatctctgacttctgagtgatagagtcctggctgcagagccctcctgtggtcccgttcatcagtcttgggaactcataacattggggagaataagcacagcctttgagaacctgcacaccacccccaccctgtagaggtccagaaacgtctcacaggcaagcagcctaggtctgcctgtaacaaaccaggagcaggcagagatggagaccgcactgaattaaggcgtccagctactaacatcacagacagaaaagcctcccagtggacaagcacagtattgcctctgagctattcacatcaaagctaatggaacctgaatctgagtaagaactagacccaatcagcaaagtgcagaaaatacaggagacagaggagcacatgaaacaccaccacagaggtgcaatcagcacaaatccagactgccagagaccctccagggagaacagctggcttcctcaacaaataaatggcaatgcatcaatgagaaaggaaccaggagcctatagactaaatgagaaatataaatatcaatcaattacagtgctgggccttatctggatcccaattcaactgtatgtattgcatattatatacatgtctatatattatgtacacacacacatgccatttggaacaatgtgattctccagtgagctatttgatgatcttaaagaactatagttactttatttatctatttacttgagacagggcctggctctgtcacccaggctggagtgtaatttgggctcactgcaacctctgcctcccaggtgcaagggatcctcccacttcagcctcccaagtgctgggaccacaggtgtatgccaccgtgcctggtgaatttttgcattttttgtaaagacagggtttcatcacatgcccaggctggtctcaaactcctgggctcaagcaacccacctgcctcggcctcccagagtgttgggattacaggcatgatccactgtgcccagcttatagttactttaaaaaaaaataaaaaaaataaaaaaaaggtcaggcatggtggattacacctgtaatctaatcccagcactttgggaggttgaagcaggaggatcacttgacctcaggagtttggggttgcagtgagccacagtcatgccactacactccagcctgggtgacagagtgagaccctgtctctgaaaagaaaaaaaggccgggcgtggtggctcatgcctgtaatcccagcacttttggaggccgaggcaggcggaccaccttaggtcaggtgtttgagaacagcctggccaacatggtgaaaccccatctctactaaaaatacaaaaaattaactgggcatggtggcaggcgcctgtaatcccagctactcaggaggctgaggctggagaatcgcttgaacctgggaggtaaaggttgagccaagatcacgccactgcactccagactgggcaatgacagtgaaactccatctcaaaaaaaaaaaaaaaagagaaaagaaaaagattatttatttatttatttgtatttcaatagcttggttacatggatagactgtatagtggtggagtctgggattttagtgcacctgtcaccgcattagtgtacattgtacccaatacatagtttatttatccctcaccttcctccccattccaccttctgagtctccaaaggccattataccattccgtatgcctttggacacttataccttagctcccactcataagcaagaacacatgttatttgattttccattccggagttacttcacttagaataatggcctccagttccattcaagttgctgtaaaggacattatttcattcttttttatggctgagtagtattccatggtgtatatataccacattttctttttccattgattggtcgatgagcacttaggttggcttcatatctttgcaattgtgaattgcgctgagataaacatacctgtgcaggcgtctttttttttttttttttttaattttttggagatagggtctcgctctgtcacctaggctggaatgtagtggtgtgattttggctcactgcaacctcctcctcccaggttaaagtaattctcctgcctcagcctcctgagtagctgggactacaggcacatgccaccacgctggctaagttttgtatatttagtagagatgggtttcaccatgttgtccaagctggtctcgaactcttgacctcaaatgatgtgcccacctcagcctcccaaagtgttgggattatagacatgaaccaccgtgcccagccccaggtatctttttgatataatgactgcttttcctttgggtaggtacccagtaatggggttgctggattgaatagtagatctacttttagttcttttttttttttttttttgagacggagtttcgctcttgttgcccaggctggagtgccatggtgtgatctcggctcaccgcaacctccgcttcccatgttcaggtaattatcctacctcagcctcccgagtagctgggattacaggcatgcgccaccacacccggctaattttttgtatttttagtagagaaggggtttctccatggtggtcaggctggtctgaaactcaagacttcaggtgatctgcccgcccaggcctcccaaagtgctgggattacaggtgtgagccaccgtgcctggccttacttttagttctttaaggactctccatactcatttccatagaggttgtattaatttgcattcccaccagcagtgtattagcattcccttttccccacatccatgccagcacctattgtttttgacttcttaataatgaccattctggctggggtaaggtggtctctcgttgtggttttaatttgcatttcccagatgatgagtgatgttgagcattttttcatgtgtttcttggccattaagactttttttttttttacggcagctgtaggttcacagcaaaattgagaggaaaatacagagagttcccatacaccccctcccccgcaaacacacatgtacatcctcccccattaacagcaaactccaccagatggtacatttgttataattgatgaagctacattgacacatcattatctcccagagtctacagttttacattagggttcactcttggtgttgtacattctataggtttggacaaatgtataatgacatgcatccaccactgtaacatcatacagagtcgtttcatggccctgagagtcccctgtgctctgcctgttcatccctccctctcccctaacccctggctatcatcaatccttttacagtctatatagttttaccttttcagtatgccatatagttggaatcatacagtatgtagccttttcagactggcttctttcatttagtaatgtgcgtttaaggttcctccatgtgttacggctggatagctcatttctttttttttttttttttttgaggcagagtctcgctctgtcgcccagcaggctggagtgcagttgttcaccgcaacctctgcctcccgggttcaagtgattctcctgcctcagcctcccaagtagctgggattacaggcatgaaccaccatgcccgggtaattttgcatttttagtagagacggggtttctccatgttggtcaggctggtctcgaactcctgacctcaggtgatccgcccgccttggcctcccaaagtgctgggattacaggcatgatacaggcgtgagccatcgttttttgtttgtttgtttgtttgtttgagatggagtttcactcttgttgcccaggctggagtacaatggcgtgatcttggctcaccacaacctctgcctcctgggtttaagcgattctcctgcctcagcctcctgagcagctgggattacaggcatacgccatcatgcccaactaattttgtatttttagtagagacagggtttctctatgttggtcaggctggtctcaaactcctgacctcagctggtccgcccgcctcagcctcccaaagtcctgggattacaggcatgagccactgtgcccagcccagctcatttctttttagcattgaataatactgcattgcctggatgtatgacagtttatttatccattaccctactgaagaacatcttggttgcttccaagttttggcaattatgaataaagctgctataaatatctgtgtgcaggttttcttgtggacaaaagtatttaactcatttgggtaaataccaagggaaacaattgctggattttatggtaagactatgtttagttttgtaagaaactgtcaaattgtcttccaaagtggctgtatcatcttgcattctcaatagcaacgaatgagaattcattgaaaaattcatttaaaaaaaatacaactggctgggtgtggtggctcatgcctgtaatcctagcactttggaaaggaggatcgcttgagctcaggagtttgagaccagcctgggcaacatagtgagacccccatctctattcattttagaaagaaaaagaagaaatagaactgataagctaagaaaggagagaaaatggaataatagaaattatcagttaaaggccgggtgcagtggctcacgcctgtaatcccagcactttgggaagccaaggtgggcagatcacgaggtcagaagttcaagaccagcctgaccaacgtggtgaaaccccgtctctactaaaaatacaaaaattagtcaggcatggtggcatgtgcctgtaatcccagctattcaagaggctgagacaggaaaatcacttgaacccaggaggctgaggttgcagtgagccgagatcacgccactgcactccagtctgggcaacagagtgagactccatctcaaaaaaaatgctcagttaaaaacacaaaaggcggaaaaagtgggagacaaaaataaaacaaagcacatggacaagaaatagaaagcagtaacaaatatgctaaatattaatccaagtatatcaataatcactttggggtttcttttgtttttgctttttgtttttgagatggagtcttgctctgttgctcaggctggagtgcagcggcgtgatcgcggctcactgcaacctctgcctcccaggttcaagcgattcccctgcctcagcctcctgagtaactgggattacaggcgcactccaccacgcctggctaatttttgtatttttaatagagatggggtttcaccatgttggccaggctggtctcgaactcctgaccacaagtgaaccgcccaccttgacttcccgaagtggtaggattacaggcatgagccaccctgcccagctcaataatcactttgaacgttagtggtctaaatgcatcaattaaaagacagagatcttcagagtgattaaaaaaccaagacccagccaggtatgatggctcacgcctgtaatctcagcactttgggaggctgggatgggaggatcacttgaggacaggagttcaagaccagcctgaccaacatggagaagccctgtctctattaaaaatacaaaattagccggacgtagtggcacatgcctgtaatcccagctacttgggaggctgaggcaggagtatggcttgaacctgggaagcagaggttgcggtgagccgagatcgcaccattgcactccagcctgggcaacaagagcaaaactctgtctaaaaaaaaaaaaaaaaaaaaaaaaaaaaaaaaaaaaattaaaaaaaaagaaaaagaaaagaaaagaaaggacccagttatacaaaaaaaaaacccactaaaaaatcccactttaaatagaaagacacatatagactaaagttaaaaggacaaataaatgtaggccatgctaatacttatcaaaaaaagcaagagtagctatattaatttcaaacattaatttagcaaattccagagcaagaaaagttttcagggataaagatgagcattacataatgattaagacatcaatgctccaacaagacataacaatccttaacatgtatgagcctaacaacagaacaccaaaatatgtgaagaaaaaactaacagactgcaaggaaaaataaaggaatctaccaatagtattagagacttcaacactcctctatcagaaattaacagatcccacagaaaagcagtaaggatattgttaaactcaacagtaccatcaatcaactggatataatggacacaaataagctactttatccaacaacagcaggttacctattcttctcaagcttgcacgagacattcaccaagatagaccacattctgggccataaaacgtaccttaccaaatttaaaagaatagaaatcggctgggcatggtggctcacacctgtaataccaacactttgggagcccgaggtgggtggatcacgagatcaggagattgagaccatcctggctaacatggtgaaaccccgtctctactaaaaatacaaaaattagccaggcgtggtggcaggctactcgggaggctgagacagaagaatcacttgaacacgggaggcggaggttgcagtgagctgagattgcgccattgcactccagcctgagcaaagagagcaaaactccatctccaaaaaaaaaaaaattaaaaatatttttaactaaatcaaaatgaaggccgggcatgggtggctcacattggtaatcccagcactttgggaggctgaggtgggcagattgcttaaactcaggagttcaagagcagcctggccaacatggcaaaatcctgtcactactaaaacctacaaaaattaaccaggcatggtggtgtgtgcttacagtcccagctactcaggagactgaggtgggaaatcacctgagcccaggaggttgagactgcagtaagtcatgatcacgccactgcactccaacctgggcaatagagcaagactctgtctcaaaaaaaaaaaaaaaaaaggaagaaaagaaaacacaacttatcaaaaattgtagatgcagcaaaagccatgcttatagggaaacgtatagcatcaaatgcatgttttcaagaagaagaaattggctgggcatggtggctcacacctgtaatcccagcactttaggaggccaagacgggcagatcacttgaggccaggagttcgagaccagcctgaccaacatggtgatacgtcgtctctacttaaaatacaaaaattagccaagcatggtggtgcatgcctgtaatcccagctactcaggaggctgaggcatgagaatcatttgaacccgtgaggtagaggttccatcgagctgagattgtgccactgcactccagcctgggcaatagagctagaccctgtccgaaaggaaaggaaaggagaggagaggggagaggagagagaggagaggggagaggggagaggggaagaaaagaagatctaaaatcaatcatctaagcttccacttcaggaaactacaaaattaaatccaaagtaaccaaagaaaaaaaatcaaaattaaatcaaaattaaaaaattaaaataaattttaaaatatttggccgggcacggtggctcacgcctgtaatcccagcactttaggaggcccaggtgggtggatcacctcagatcaggagtttgagacaagcctggccaacatggtgaaaccccgtctctactaaaaatacaaaaagttgccaggcatggtggtgtgtgcatgtaatcccagctacttgggaggctgaggcatgagaatcgcttgaacccgggaggtggaggttgcagttagccgagatcttgccactgcactctaggctgggtgacagagtgagactccgtttcaaaaaaaaaaaaaggaagaaagaagaaggaggaagaagaaggaggaagaagaaagaggaagaagaaggaagaagaggaaggaaggaaggagaagaagaagggggaggaggaggagaaggggaaggggaaggggaaggggaagaacaaggaggaggaggaggagaagaagaagaggaggtggcagccgtgaggcagaaatcaagactgctggatggaactgctttggacaggagaaaggatctggagagccctggttctggggagccaccatgctcaggtgtcaatcctcggtagatctatgggggaactgggggtggccaagcgttctgagccagccggaaagctgcgtgggttgcagcagcctgggtgggttcgagttggtcagcagggaaaggccccctgggttccaggcacccgggactcagctgcagagacggtgaaccaagccccttcctctcctagactcaccttccagcccaaaaaagatgattggcaaataaagttaataaacacaatcatttcaagtagagtcaggtgctctgaattacatcgagcagatggatgggaagcggcgcaggagggaggtgtggacggggaggatactgggggagggagaggcagccccagagggtctgtgggaagggacagccagtgcaaagctgcagaggagggacagggcatggtgggggagtattcaaaggacagaggacaaatgaagggagatgaggaccaagcccaccagggctggatggtgctggcgtcaatgggccgtgcccaggaaggtgggtttattgttagggtctttgaggagtcagtgagggtttttatcagacatggtgtgatttaattttgcttgtttttattggggtaaaatacacataacatgaaatttgccattgtaaccacttaaaagtgcaccattcagtgtcattgagtaccttcacaatgtcgtgcaactgccacctctatctagctccagaaccacccccaaaggaaaccccagacacattaagcagtcactggccacttcccctccccctgcattgcatccgtgaatttgtctgtttctgacatttctttgttgtttctttttttgtttgtttgtttgagacagagtcttgctctgtcaaccaggctggagtgcagcggcgtgatctcggctcactgcaacctctgcctcctgggttcaagcgattctcatgcctcagcctcccaagtagctgggattacaggtgcctgttaccacatctggctaacttttgtatttttagtagagacggggtttcaccatgttggccaggttggtctcgaactcttggccttaagtgatccgcctgcctcggtcccccaaagtgttgggattacaagcgtgagccaccatgcctggccacttttttttttttttttgagacagggttttgctctgtcacccaggctggtgtgcagtgccacaatcaaggctgactgcagccttaacctcctgggctcaagagatgcctcctggtggagctgggaccacaggtgtaggacaccatgcccagctaattttttttgtatttttgatagagtagggctttgccatgttgcccaggctagtctcgagctcctgtgcccaagcaatccacccgcctcagcttcccaaagtgctgggattacaggcatgagccactgtgcctggcctggacatttcatgcaaatgaaatcatccaatctgtggccttttgtgtctggcttattttgatttaatttattccctttttatttatttatttatttatttgagacagagtcttactctgtcgcccaggctgaagtgcaatggcactatcttggctcactgcaacctctgcctcctgggttcaagtgattctcctgcctcagcctcccgagtagcagggattacaggtgtgtgccatgacacccagctaatttttgtatttttagtagagacggggtttcactttcgaactcctgacctcaggtgattcaccctcatcggcttcccaaagtgctgggattacaggcatgagccacagcgcccagccttttttttttttttttttttttgagacacagtctcactctgtcgcccaggctggagtgcagtggtgagatcttgctcactgcaacctccgcctctcacgttcaagtgatcctcctgcctcaacctctggagtagctgggattatagacacttgacaccacacccggctaatttttgtatttttagtagagacagggtttcaccatgttgagcaggctggtctcaaattcctgacctcaggccatctggccgcctgggcctcccaaagtgttgggattacaggcatgagccactgtgcttggcctgatttaatttcttaaagcctctcgtagagaagggcccgtagttgggcatggttaaggcaccattaggtgggacgtgctggggggctaggccgtaggagcgggatggtgagaagaggcgatctggagggatcatggaggcatcgcccccaggatttgcagcgactgggccagggggggatgagggattgcaaggagtggggaggactcgggtttcaggcctgagcaagtgggacaatgggggtgccaatgtgaggtggtggagactgtgagcggggcagcgccatggcaggggatcagtcaaaagtccactcaagaattgagagtacgggggaggtgctgctgcacaaacttttagcacaagccaagcctgcacccactggaatgtgagcatcggagtgggtggtggggcaagtgacaggcacagtgctcatcaaggatggtgggccatgggtcatacacctccaggttcttttggtgggaacaacaggtcaatttcttctgctcagtaggatgtatatcagcaagaagatgagcacaccagctcactcaaaactttaaggaaccaggccggatgcggtggctcacgccgcctataatcccagcactttgggaggccgaggtcggggggatcacctgaggtcaggagttcgagaccagcctggccaacatgatgaaacccccatctctactaaaaatacaaaaattagccaggtgtggtggcatgcgcctatagtcccagctacttgggaagctgaatgaatcacttgaacctggaggcagaggttgcagtgagccgagatcatgccacggcactccagcctgggtggcagagcaagactccatctccaaaaaaaaaaaaaaaaaagacaaaacaaaaaactttaaggaacccattcacctgcctaattagtggaaatgtttctagggccacagggccaaaatgcacagttgcacaggttggacactgcacaacccaaaaggagtatatttatacagacttggacatgactgacatcttccctgaagtcaggcagtatacaatctgtgcagtggtgcctggtgccgggcagtcagggtcatcatgaagttgctgtgtttctaagtaaaggagctcccttgagaagagatagggaagtttgtgagaaatatgtcagctttcgtggcctctgaaggtcaagtgaactctggcatttaaacacagcggccagagtcactacacatcctgtgttttctttatgagaagaaaagcttggcaagggaaatgtcagcaacaaggtacacgcagctggttcgccgcaagacggccacccatgtcgtgctgtcttcacatattccaggcactgggaggtctctccaggattaaggccaccaccctcccctcactgccgcctcccctgtcatgcacatgggaaaggcctggctcctcttaggccaggcagaccaccctactttatttggccttggggccagtggacaggccttctagggctgccaccttggtccccaggggcagtgcactacacaccaggcatcggcagtgggcacgactccctctgggattgtgcaaacaggacctctctccagcagctccacggagcaggtctcaagagccccggacctgggtttgaatctcagcggtgccactggctggctgactgtaggactttgggcaagtcactttacctctctcagcctctgctttttcctctgctaagtgggaactagaaggctgacctctcagggctgctggaagggacagaggggcatgtatagagtccctggcccatccttagggagatgaggggagaaacttacacccactcacatattcacacacacacacacacacatacacactccaaacaaagtttcattttttttctttttttttttgagatggagtttccactcttgttgcccaggctggagtgcaatggcgcgatgatctcagctcagtgcaacctccacttcccgggttcaagtgattctcctgcctcagcctcccgagtagctgggattacaggcacttgccacaacatccggctaattttttgtatttttagtagacggggtttcatcatgttagccaggctggtctcaaactcctgacctcaggtgatccacctgcctcagcctcccaaagtgctgggattacaggtgtgagccactgcactggccctaatcaggtttcaaatccttctctaaatacccatcctaggccaccatgtctcactgattcttttattccttttttttttaagaacaatatctaaaatgcaaaaaaaaaaaaaggatataataataaacagtcatattttcatcacccagagaagtccagccgccaagcaggtggcctttgatggtgggaggcagtgccacccctgccctgcctccctcttcactctggcttaccccatggtgcttttctggcgcagatgaggaaacagggatttgagggctgcaggaggcagaggagccatcctcccggttctctcagacaggacaggaagcctggagcacccagcttcacagaggccccagcacttccgtaggcctcgcaccacctccctcacccgcctttgccaagccacccgctgtgatgatttgaaggccactccggcagggcagagaggccctgcaggtgatcttgcactctgcctgcatttccaccgccagagcctcagatcttttgttctcccaaatcaatggcagcaatgctgtgggctgcctcaagtttcgcctctcatcctgggatcgggcgggggctgggagtcctattggacagggatgccccattcgggggattgccagtcagggctggggtacgggtgaaccctcaagagtgacacatctactgggtatttagacatgggaaacaacttcccatttggctgcgaggaggcttcgggagctgggaagttcccctgcaactgcctgtgctcccgggaggaaaggccccacccaagccagatcgtggtcccctcgcaggtgtaacgcattgagctgggtgagctgggcagccttggagttgaaaggaccccaggaatccagtccaggtcccctgtggtgcaaatggggaaactgaggtccggacagggagaggacctcacccagccggtggctgccaggtaacgcatgtctttggttttgtccctttaactctgtgagtctgggtctcagtctcctcatctgtcagttataaatgataatcccactacagtcccagggcattgccggagaagctggcggcggcgtggcagttgctgttctctgaaaagtccccactgttcctgccctcccagccttggtctttgctgggccctggggtcccttcctcaggctcctccctgctgagcccgccccccgcacatcctggcttgggtccctgcagtaagccctgttctcacccccacccccgtccaggaacaagggctgggatgctctcaccagcgtcagcttctctcatgctgaaagctctgactcttgcaccatgcccaggccagagccctcactcaatgcactgaataactgagcacacacaggcacacctggaatcctaaccgcttccacggtcccctaaatgctcatcctgagccagaaagtctaactgactcttttgttgttcttttttttttttttgagacaaggtctcgttctgtctcctaagctggagtgcagtggtgcaatcatggctcactgtagcctccaactcataggctcaagagatactcctaccttagcctctcaagtagctagggctgcagatgtgaccaccgcacctggctaattattataatattattattgttattattttttgagacggaatcttgctctgttgcccaggctggagtgcaatggcatgatgtcccggctcactacaacctccacttcccgggttcaagtgattctcctgcctcagcctcccaagtagctgggattacaggcacccgccaccacgtctggctaatttttttgtatttttagtagagacagggtttcgccatgttggccaggctggtctcgaactcctgacctcaggtgatctgcctgctgcggcctcccaaaatgctgggattacaggcatgagccaccatgcctggcctcacctggctaattttttgtttgttttgagatggagtctcactctgtcgcccagcctggaatgcagtggcacaatcttggctcactgcaacctccaactcccaggttcaagtgattcttctgcctcagcctcccaagtagctgggactacagacgtgcgccaccacgcccagctaatttttttacttttagtagaaacagggtttcaccatattggccaggctggtctcgaactcctgacctcgtgatccacccgcctcagcctcccaaagtgctgggattacagttgtgagccatcacacctggcctcacctggctaatttttaaaaaatcttttgtagatatggagtctcactatgatgcccaggctggtcttgaactcttagcctcaagtgatcctcccatctcggcctcccaaaatgctgggattataagtgtgagtcactgtgcctggcctgttcttctttaaaagaaaaaaatctggccgggcgcggtggctcacacctgtaatcccagcactttgggaggcagaggcaggcggatcatgaggtcaggagttcaagaccagcctggccattatggtgaaaccccgtctctactaaaaaaaaaaaacaatacaaaaattagccaggcgtggtagcacgtgcctgtagtcccagctactcgggaggatcgctgaggcaggagaatctcttgaacccaggaggcagagattgcagtgagccaagatcccgccattgccctccagcctgggcgacagagcaagactccgtcaaaaaaaaaaaaaagaaaagaaaagaaaaatcttaaaatgcagaaagatggaaagaataataaacagccatatttccctcagcccaaagtaaaactgtccacacctcatcattactgcttctttcgctttctcttttgcccgggggcaggtggcggcatggtgcacggcgggaggcgggcagtgatgcctgttttccccatgttccccattcacaatggccgttgtcgtccatgccaggtggccccagaccgatggaagaaaggaagccccagtgggagttttggtttggatgtctctggttatcctctcacacactcaccagccagctcaggtcccctctgtaccctgctcactcatatattttgccatttttctgttgtgtttcctgcttgttccttgttggtctgcaggagttctttgaatgtgctaggtatgaattctttgttggttgtttggtttgtgacatttacataaaataagattaactggttttttttgttgtttttttttttttgagacaggatcttgctctgtcacccaggctggagtgcagtggtcgaactcctgggctcaagcaatcctccagcctcagcctcctgagcacctgggtctacaggcgttgcaccaccatgcccagctaattttttgattttctgtacagacagggtcttgctatgatgtctcagctggtctggaactcctgggctcaagcgatctacctgcctcagcctcccaaagtgctgggattacaggtgtcagccacggtgcccagccagattaaccattttaaagtgtatagtttagtggcatttagtatattcacgacgttatgcaatcattacctctaccttcttccaaaacatcttcatcatcccaaaaagaaaccccatccttcttaagcaatctcttcactttgcattcccctcttccccaattccttggcaaccagcaactggctttctgtctctatagacttacctattccacatatttcacataaatggagtcatacaacatagtgaccttttgtgcctggctttttttttttttttttttttttttgagacagagtttcactcttgttgcccgggctggagtgcaatggcgcgatctcggctcactgcaacctctgcctcctgggttcaagtgattctcctgcctcagcctccagagtagctgggattacaggcatgcaccaccacaccctgctaaatttttgcatttttagtagagacgcagtttcaccatgttggcctggctggtcttgaactcctgacctcaggtgatccactccccctcggcctcccaaagtgctgagattacaggcgtgagccaccgcgcctgacagcctggtttttttttttttttttttttacttaacatgttttttgtagcatgtgccagtactttattcctttatatggctgaataatattccattatgtggctataccatgctttatttagccattcatctgttgataggtatttgggctccgccatcttttggcgattgtgaatagtgctgctataccatttgtggttatttgtttgactacttgttttctttttttttctcttttttttagatggagtcttattctgtcgcccaggctggagtgcagtggcacaatctcggctcactgcaaccttcacttccctggttccagcgattctcctacctcagcctctcaagtagctggggccacaggcgtgagccaccatgcccaggtaatttttgtatttttagtagagactgggttttgccatgttgcccaggctggtctcaaactcctgggctcaagtaatctgcccacctgggcctcccaaagtgctgggattacaggcatgagctactatgcccagccaaaacctcttctccacattctcatccacactcctcattttccgttttacttttattgtagccatcctagtgggcacaaagtggtatattagtgtggctttgacttacatttccttttttttttttttgagacagtctcactgtcacccaggttggagtgtagttggtgaatctcagctcactgcaacctccacctcccaggttcaagcagttctcctgcctcagcctcccgagtagctgggattacatgcgcacaccaccatgcctggcaactttttgtatttttagtagagacggggtttcaccatgttggccaggcttgtctcaaactcctgatctgaggtgatccacccgcctgggcctcctaaagtgctgggattacaggtgtgagccaccaaccccggccttacatttccttcatgactaatggtggtgagcatcttttcatgtacttgttagtcacttgtacgtattactgaagaaatgtatattcaagtcctttgaccctttttgaattgggttgtttatcgttttgttgagttgtaagagttctttatatattctggatatctgacccttataagacataatttacagacatgttctcccattctgtgggttgcctttttactcttgatacaggttgagtacccacattcgcaatcatgtgaggcggggtccaccttctgttccaccgtgtaagccatcaccaggctttagccaaaccatccttccccctaggctgtgagcccacctagattcccatcaccacgtaaatgagaatgtgatgggtgccccttttggggttccataggccagtgagaagcagtgaattcggggtgctcacagctccagggatagatcatgatgctcagagtcatgagaaacagcatgagctgcagaataacactggcccacagccacgcagccacatgtgtgcttgtgtaaggctcgacacacagctaaagaacaaatatcagcctcattaagaggcagccttgggctgggtacagtggctcacacctttatctcagcactttgggagaccaagacaagtggatcacaaggtcacaagttcaagaccagcctggccaacacagtgagacccccgtctctactaaaactacacaaattacaacagggggcggtggctcacacctgtaatcccagcactttgggaggccaaaaggcaggcagatcacctgaggttgggagttccggaccagcctgatcaacgtggagaaacctcatctctactaaaaatacaaaaaattagctgggtgtggtggcgggcacctgtagtcccagctactcaggagtctgacgcatgagaatggcatgaacctgggaggtggagtttgcagtgagccgacgtcacgccactgcactccagcctggaggacagagcaagactccagcttaaaaaaaaaaattttgccaggtgtggtggtgcatgcctgtaatctcagctactgggaaggctgaggcaggagcatcacttgaactcgggaagcagaggttgcagtgatctgagatttcaccactacactccagcctgggcgacacagcaagactccatctcaggaaaaaagaaggcggcaaccttggcaggggaggaagaggagaagagggctggaggaagtacatacaggagaacacattacaattaaataaaacgagcactgtctcacatggacctgttgggtctggaattggttccttccggtgggttcttggtcttgctgatttcaagaatgaagccacggaccctccccatgagtatcacagttcttaaaaatggtgtgtccagagtttgttcttccagatgtttggatgtgtccagaattgctgcctgctgctgggttcgtggtcttgctgacttcaggagtgaagccgcagaccttctcagtgggtgttatggcttaaaggtggcacgtgcagtgttgtttgttcctccccgtgcattcatggtctccctggcttcaggagggaagctgcagacccttgcagttaagtgttacagctcttaaagatggcacgtctggagttctttgttcctccccgtgggttcctgatcttgctggtttcagaagtgaagctgcagagttttgccactggagtgttacagctcttaaaaatggcacgtccggagttgttcctacctcgcagtgggttcatggtcttgttggcttcaggaatgaaaccacagacctttgtcgtgagtgttacagctcaaaaaggtagtgcggacctaaacactgagcagcagcaaaattcatcatcaaaagcaaaaaaacagaaccagggagcatcttcgttgctggctcgggtggccagcttttattcccttatttggccccacccacatcctgctgattggtccattttacagcacgctgattggtccattttacagagtgctgattggtccattttacagagtgctgattagtgcatttttacagtgtgctgattggtgcatttttacagagtgctgattggtgtgtttacaaacctttagctagacacagagcactgattggtacatttacaatcctttagacaggaaagttctccaagtccccacctggttagctagacacagagcactcattggtgtgtttttacagagtgccgattggtgtgtttacaaacctttagctaggcacagagcgctgattggtgcatttacaatcctttagctagacagaaaagttctccaagtccccacccgacccagaagcccagccagcttcacgcctcactgtgatagcaacatgccaggacttagcccctgcaccaacacccaaggaagaagtgaaaggacagctctttggcacgaggtgctccagccaggccccttcgagtttcctatgacccgtcatcgctttgacctgcctgggtccctgaagggccctaacagaggaggaagggctcttctggcaggggaagaggcctgtttctcccctaccccagtagtcatggggccaagcttcaaagtgcctgaaaggagcacagtaggggatgtctttacagcctaggaggaagccacaggaatggactatttcactgatggggtagccatgcccacatgccccagcaggccagcctggacttgtaccttctgcttgcctgggatcttcccctgcagaccgcccccggcagtcagttccacaccaggagccctcagccaaacgaccaccatcccctctgtccgtgctgacccaatgcccaggcacagtcccagccccaagatgggcccagtgatgaagtggctgccccttcacttcctcagcaatccccggtaggtcccgagtacaggccagacctccctgcgaggggcacgtccccctcagatctcaacccaggtgccctgagttgccctgcgtgtttttagacatcttctattctgcgccctggctctgtcccccccatctgtgtgtataaccctctctattcctgcccgctcctgctccctcttcctccatcttcccttccttcctttcactgaccccacacatactgtctgaatgcctactgtgtgtcggccaccaggcactccccaggggatgaggcgagcagggtccacatgtgggccaagacacagtcaaaaccactcagagagcaacgagcccttctgggtttgtttgtttgtttgtttgtttgtttgtttgagatggagtttcgctcttattgcccaggctggagtgtagtgggttaatctcggctcactacaacctccacctcccgggttcaagcgattctcctgcctcagcctcctaagtagctgggattacaggcatggaccaccatgcccagctaatgttttgtgtttagtagagagagggtttcaccatgttggtcaggctgatatcaaacccctgacctcaggtgatctacctacctcagcctcccaaagtgctgaaattacaggagtgagccactgcgtctagctgagcccttgtgttttaagctgcaatgtgggacaaaaagataccaggcagcaactgtagggagggtggccttggaaggcctttctaaggaggtgacagtcacactgagatctagaggcaaggacacccgctttgcaaagttgtcggggaagagaagtcaggcaggggaacagcagatgcaaaggcctggaggcagaggctgagatcctcccgaggaccagcccctggcctcggaggtggttggccctcagtgaccagagaaagaacagtctttgctggtgtcacacagcaagtacgaggcagggatctaggtaagaaaccagaccctgccaatactacgtctcatgttcctgccctggccactgaacacttgctgaaggccacccttattcaccgatgacagtgtaggatcggtgaggccaccagcaaccattagcgtctgcccagagctggggatggtcccaatcagatgctcagctccagctgggaaaacaaaagcagcaccacatccccactgtctttgccatgctgttggggacgttggccagtattggatcaccagctgaggcacacacactttttttttttttttgagacggcatctcactctgttgtccaggctggagtgcagtggcacaatcttggctcactgcaacctccgcttcccaggctcaaagtgatccttccacctcagcctccggagtagcttggactacaggcaggcaccaccatgcccggctaattttttatatttttttgtaaaaacagggttttaccagtttgcccaggctggtttcaactcctgaactcaagtgatcctcccaccttggcctcccaaagtgctgcaactacaggcatgagccactgcgcctggccaggcacatgctgagagagagagccatctgccaacagctcatgcattcacttaccagtgatgtcatttgcctgtgagcacccaccatgtgtcaggcacggggctggggcctgcccggccattccatcacctcctccaggcttctgtatctgcgcccctgtccctgaaatagcatttccacctgccttggatgctctctgaaaaatgctccccaaaagatgttcatatcctaatcctggaactcatgaaggtttctgctatggtttgaatatgttccccagatttcacgtgttaaaacttaatcgtgggaggccgaggcaggcggatcacgaggtcaggaaatcaagaccatcctggctaacatagtgaaactctgtctctactaaaaatacaaaaaattagctgggcgtggtggcgggcgcctgtagtcccaactactcagaaggctgaggctgaggcaggagaatggcgtgagcccaggaggcggagcttgtaccactgcactccagcctgggcgacagagtgagactgtgtctcaaaaaaaaaaaaaaaaaatacttaattccagctgggtgtggtggcttatgcctataatcccagcactttgagaggctgaggtgggagaatggcttgaggtcaagagttcaagaccagcctgggcaacatagtgagacccccccatctctagcccccctaaaaaatgatttaaaaaatccccaaattcatatgttgattggaggtggggccattgggaggtcattaggattagatgagggcgtcagggtggggccccatgatgggacttgtggctttataagaagaggaagagagacttgagctggcacactcttgccctctcgccatgtgacacactgtgccgtttcctgacgctgtaggaaggccctcaccagatgttggcaccatgctcttggactccccagcctatagaaccatgagctaaataaacttctattgcttataaactaccagtctgtgatattctgttataacaacagagaatacactagacagaaaattggtactgagaagtgttgctagtaacaaatacccaaaaacacagaagcagctttgaaatgagtagcattacccaatgggctggaagaatttggagaagcaggctagaaaagcctgtattgctgtaaaaagagcattaagggcaattctggtgaggtcttcgaaaacaagaagactaggggaagtctggaacctctgcgagattacttaagtggtcatgaccagaatgcagatagaaatgtggagaataaaggccactctgatgaagtctcagatggaacggaggaacaagatattggaaactggagtaaagcccgtccttgttataaactggccaagaacttggctggattgtgtctgtgccagggactctatggaatgcagaatttgagagcaatacattaggatatctggcaaaagaactatctaagctgcaaagtgttccggctgctgcacagctacttacattaagctgcaagagggaaaatgacttaaagatgaaatttataatcaaaagggaagcaaagcagaaagtcttggaaaattctcagcctggccacataaagagagaagaggcatgttcaggagagggaaccaaaagggtggcccagcaactgttcgctaaggaaattagtacagggagaaagatcggcaagagaatagaagaaaggtcgcgtgcggtggttcatgcctgtaatcccagcactttgggaggctgacgtgggcggatcacgaggtcaggagttcgagaccagcctggccaacatggtgaaaccccatctttactaaaaatacaaaaattagccagacatggtggcgtgcgcctgtaatcctagctactcaggaggctgaagcaggagaattgctcgaacctgggaggtggaagttgcagtgagctgagatcatgccactgcactcgggcctgggcgacaagagtgagactctgtctcaaaaaaataaataaataaataaataaataaataaatgagagaatggaagaaagaccccgaagcatttcaaagatcttccaagctggccctcccatcacagacccagaggcctaggaaggaagaatggttttggggacaggccaggcacccttcatggatttgctgtccagggccccctagagtgtccgtgctctcatgtagtgtttcctccactgtcccagctgtggcacaagcagccccaggtgtggctggacccactgctctggaagatataagcccatagccttggtggcatctgcatggtgctaattctacaggctcacagaaagcaagagctgtgagtatggcagcctctgcctagttcaaaggctgtatcagccttgtagcccaagcaggatttgttgcaggggtggagacaccacaaaaagcctctcatgaaggcaatgcctggtggagctgaggcagtgagaccatcaccaagacccgagaactgtacagctaccagtgtgcaacgccagccagggagagctcaagtgtgggctgggcccagcaaagccatggaagccaggctgccccaggcctttggggcccaccccccaccccagtatgtccaggaggcggaacacagagtgaaggattattctggagtcttaaggtgtgatgtttagcccaggcttggtggctcactcctataatcccagcacttggggaggccgaggctggcagatcacaaggtcaagagatcgagaccatcctggccaacatggtgaaaccccgtctctactaaaaatacaaaaattagctgggcgtggtggtgcacacctgtagtcccagctactcgggaggctgaggcaggagaatcacttgaacccgggaggcggaggttgcagtgagccaagatcatgtcactgcactctagcctggtgacagacaacaacaaaaaagatacaatatctaccctgttgtgtttgggcttctttgggaccatctgcccctttcatcatgcctacttctgctttttggaatgggaatgtctatccaatgcctgtgccaccactgtattttgggaggagataacttgtttgatctcacagggtcacagctggaaggaattcatcgcaggatgaatcgtaccttcagtctcacccatatctcattcagatgagactctggactgcagacttttgagttgatgctggagcaggttaagactttggggctttggggatggaatgagtacattttgcatgtgaggacatgcattttggggcccagggcagactactgtgttttgaatgtgtctcctaaatttcatgtgtgggagacttaatccccaaattcatatgttgattggaggtggtgcctttgggaggtagttgggattagatgaggtcattggggcagggcccccaggaagggactgatgactttctaagaagaggaagaggctgggtgaggtggctcatgcctgtaatcccagcactttgggagactgagtgggtggatagcttgagcccaggtttttaagaccagcctgggcaatgcagtgaaacttcatctctataaaaaatacaaaaattagctgggtgtggtgatttcgtccacacgtactgcagtcccagctactcgggaggcatgaggtgagaggattccctgagcctggggaggtggaggctacagtgagccgtgatcacattgctgccctccagcctgagcaatggagtgagtcctgtctccaacaaattgtttaaaaaaggagaggacgaaagacctgagctgacagcttctgctctctcccatgtgaagccctgtgccatggaatgatgccatgagaagtcccacaccagatgccagtgtgatgcgcttggactccctagcctccagaaccataagcatataaacctctattgtttataaatgacccagtttgttttatagaaacaaaaaactgagacagttttcttacatggcaaaaagcggggtgggtctatcaggtgtgactgaggattctgagatgaggagattgtcctggggtatcggggtgggccctgaatgccatcactagtgtctttataagaatggggaagcaggccatgggtggtggctcacgcctgtaatcccagcactttgggaggctgaggtgggaggatcacctgaggtcaggagttcaagaccagcctggccaacatgatgaaaccctgtctctactaaaaatgcaaaaaattggccgggcacggtggctcacgcctgtaatcccagcactttgggaggccaaggcgggtggatcacaaggtcaggagcttgagaccagcctggccaatatggtgaaaccccatctctactaaaaatacaaaaattagccaggcgtggtggtacacacctgtagtcccagctactcgggaggctgaggcaggagaattgcttgaactcaagtggcagaggttgcagtgagctgagatggcgccactgcactccagcctgggcaacagagtgagacttcatctcaaaaaaaaaaaaaaaaaattagccgggtgtggtggcacgtgcctgtggtcccagccactggggagggtgaggcaggagaatcgcttgaacacaggaagcagaagttgcagtgagctgagattgcaccactgcactccagcctgggtgacaagagtggaactccatctcaaaaaaaaaaaaaaaaaaagaatgaggaggcagagtgatgaccacacacagaagagaagacagggtgcagatggagtggagagacctccaaagatgctggcctggaagacggcagtgatgtggccacaagccaaggaaggccggcagctgccagaaactggaggaggcgaggaacaagtctgccctagagccctgcagagggagcacggccctgcagacaccttgatttctgcacagtgacactgatttcaggcttctatcctccagaactgtgagagagcaaatttctctcacttgtggcaattcattacagcaggaaacaaacacactcgctaaccctttactccaatttaccagcgccctcctctgctcctgcttatggagtgtatgtcattcccagctggaatgccaactgagggcagggttttaagagccttgtttttcactgcaccctagggctcacagcaccaaacacaggttgaatgcacaacgaatgaatgaatggaggaaccagtattttttcatttttcaaaagtaataataacttttacatgaatgtgggcttaggcatatgcttagaaaaagtcccaagggggccgggtgcagtggctcatgcctgtaatcccagcactttgggaggccaaggcaggcagataacgaggtcaggagagcaagaccatcctggctaacacggtgaaaccccgtctctactaaaaatacaaaaagttagccaggcgtggtggcgggtgcctgtagtcccagttactcgggaggctgaggcaggagaatggcgtgaactcaggaggcagagcttgcagtgagccgagattgcaccacggcactccagcctgggcgacggagcgagactccatctcaaaaaacaaaaacaaaaaaacaaaaaaacaaacaaaaaaaagtcccaagggaatctacacaaatttctaccagcacttagcaccaggaatgaaactacagaaagcttcacattccacagtgaacacttttgagggattcaagaacctctattaattgttatcaagaaaccaaataagaaaagcaaaccataaggccgggtgaggtggctcatccctgcaatcccagcactttggaaggctgaggcagacagatcacttgagctcaggagttcgagaccagcctcgccaacatggcgaaaccccaaaaccccatctctactgaaaatacaaaaaattagccaggcgtggaggtgaatggctgaggcatgaggatcactcgaacccaggaggcagagtgagctgagtgagctcagtgagctgagatcgcaccactgcactccatcctgggtgacagagcgggaccctgtctcaaaaaaaaaaaaaaaaaaaaaggcaaaccatgaagaggagaggagcaccattttttccaaaagggtgattctctatggagttggggtctggagagcatctgcttgaatggaagtcgccaacaggaagaaagccatgctttgcagaggcctcactagcctggagagccaccagggccctcaagggcaatcaaagttcccatcattggactaagaggggcaggaacgtccacctgtctttcctcagataagagaaggggctcttggagactttggggggccatttagacgttgagagcttagttcctacaccacagttcctacaccactgatggctgctgccatgttttattggcgacctgctccgggccaggcacgtggattgtttttaatcatctcggcaaaatctcaaggtggggccagtctttgatttatggaggagaaaaccgagactctgagaggtggtttgctcaatgtcacacagctggaaggtggcagaggtgagaggggcctctggtctgcactgacccttctcatgaggccacatatacccactaccatcttagcgcatgtctcggggtctgtaaggattttccacactcgggcagtgcaccttctggccattcctgggtccttgcaacactggtatctccccagttcaccagtcgtttaaaaatgcttaagggagttcaattctgccccaacaccaggcaaacagtgccacctggcggatgacaaggacagtacaggaattaccatgtgcccttgggaaactgtccccaggcagttgtgattctaggccaagggcagagttgttttctttgacttcataagaggggcaggagaggaggcccactgttaccacagctgaaaatcagagggctggccctgtctgggtgcttctgacagcgaacccagactttctgggtcccctctatggtatcctgccaagagatcatccagcttgggcttaaatacgtccagggtgggggtctcactctccatgtgtcttcatcacaaagttcttgctatctccgtgtaacatctactcttggctcttgctctacttccacgaagagctcatcaacctttctgccctctgacagccctttggaggatccagggagctccactttctcctccagactaagcagcctccatcactgctctcaggacaggaatctggctcttctccctgaagtcatgctcctcaggtcttcctggcttgagtgcttgtggttgggaagtaggatgggaggggcagagacagcttcattttgctgtatccgatagtggaagtgctcttctcccgacacctgccatggctggaatcttctcaccattcaggtctcagctcaaatattacctccttggtaaggccttctctgaccaccctgggctcaagtagcctccccaggcccaccctcagccaaaccaatggcacgtttgcagcctgccccacccccacccccaacctggccatgagctccacaggacagggatttgtctgttgtgttgggtattgagtccatggccgtggagcagtggccagcatctgctggcttgatcctcaccgggatgaagagcaaggtagggcagtggctccactgggctcctccagaagcagagcctgggataagggcaaatagttaatttgggagatatccccctaaaattcttttttcttttcttttttcttttctttttttttttttaagagacagagtcttcctctgttatccaggctggagtgtaatgacatgatcatagctcactgcagccttgaactcctgggctcaagcgacattcctcagcctcccaagtagctgggtctacagacgtgcaccaccgtgtccacctaatttttaaaattatttttggtaaagacaaggtcttgctttattgcccaggctggtctcaaattcctgggatcaagagatcctgctgcctcagccacccaaaacactgagaattcaggtatgagctaccatgcttgggtatcccccaaaattctaatgttgaagtcctaacccccagaacctcaagagtgtagttgtcccttgatatccacgagggatttgttccaggaccctcacagtagataccaaaaatccaaggatgctcaagtcccgtgtataaaatggcatagtggccaggcgcagtggctcacgcctgtaatcccagcactttgggaggccgaggtgggtggatcacctaaggccaggactttgaggccagcctggtcaacatggtgaaaccccgtctctactaaaaatacagaaattagccgggtgtagtggcacacacctgtaatcccagctactcgggaggctgaggcaggagaaatgcttgaacctgggaggcagcagttgcagtgagccaagatcgcaccattgcactccagcctgggcaacaaaagcaaagcgccatctcaaagaaaataaataaataaataaataaaatgacatagtatttgcatataacctaagtgcatcctcccatgtactttaaatcatctctagattacttataatgtctaatacaatgtaaatactacataaatagttggtatactatattttatttgtatttttgttgttgtgttgttattttaaattaatttttttttctcgaatattttcaatccatggttggtttgatccctggataccagagagccaactgtaaccttatttggtgatagggtctttacaaaggtcattaagttaaaatgatgtcagtaggatgggtcctaatccagtacgagccatgtccttatcaaaaggggaaatttggacacacacacacatagagggaattctgatgaggtgaagagacacagggagaagacggcactgatacgctgaggagagaggcctggaatagagccttcccgcacactcctaggaagggcccttccttgccaacaccttgatcttggcctcacggcctccagaccatgagagagtgacgttctgttgaggcccccagtctgtgatgctttgttacagcagccctggcagactaacacaggcacccactgcacctgcacagacagggccgtggatccctttacaggtgagaaggctgagccaggggagggaggtgacttgtccctggtcactcagaaccaggcaggccacagacccaggtctctgaactcaagacaggaggatcaagcccccaatcccaagcccaccccactccccaacataaccccagtggcctgacgatgggcccctgaccaagggtaagcattggaaagcccagcctcgctcgggtaggcctggggacaaagatgcacatgcacacaccccgctcaggcctcactgggaagtggatgtggggcagggaggaagtgggggcctttgggacacatgggagcaaggtgggcttccaagacaacacccaccaccaaaaatcaccaacccagatgtgcccaggcaccaaaccccaaatgaaggtctgaccagaacggcagctgatgaacactgcccagggatgcaatcgctgattcagctcacgctgagctcagccccagggcccccgtgccctcagtgagctcagcatcttatggaggacgtgtgtatgcagacagccgcagaagaatgcttattcctgggacaggtcaacgcctcagagcctgtgggaatccgggggtgccctaaccagaacagagtgtcagggaaatctccctggaggaggtggccctggcatgaagttttgagagacaaggaagcattaactgccacagtgagacaccacttgatggtcactaccaacaaatgggaaatatgtgttgaagagatgtggggacctagaacccccgtgcgctgctggtggatgtgtaaaatagcagccactatggaagatagtgtgttgatccctcaaaaagctaaacataggctgaccacatgacccagcaatcccactcctaggtgtatactcaggagaatggacacatccacgtgaagacttgtacatgagtgtccatagcagtattattcctaacagccaaagatggaaacgacccaggtgtctatcaacggatgaacaggcagatagaatgtggtatgtccatacagtggaatattattgagccttgaaaaggaataaagttcattttattttacttatttatttatttatttttgagatggagttttgctcttgttgcccaggctggagtgcaatgatgccatctcagctcactgcaacctccgcctcccagattcaagcagttctcctgcctcagccagccaagtagctgggactacagccatgtgccaccaggcctggctaatttttttgtatttttagtagggagggggtttcaccatgttggccaggctggtctcgaactcctgacctcaggtgatccacccacctcacatcccaaagggccgggattacaggtatgagccaccacgcctggccagttttttaaaaaaggaacaaggttggtcgggcctggtggctcacgcttgtaatcccagcactttaggaggccgaggctggtggatcacctgagctgtcaggagttcgagatcagcctggccaacatggtgaaaccccgtctctactaaaaatacaaaaaattagccaggcatggtggtggcatctgtaatcccagctacttgggaggctgaggcacgagaatcacttgaacccaagaggcagaggttgcagtgagccaagatcgcatcactgcactctagcctgggcaacaagagcaaaactccatctcaaaaacaaacaaaaaaggaatgatgtcctgatccatgctacaacatggatgaatctcaaaaacatttgcctaagcaaaagcagcagacacaacagcacatatgagtccattcatatggaatgtccaggatgggcaaacccacaaagacagagagcacatgcatggttgccaggggctgggcaggggaaatggggaggttcaggtttccttctggggtgatgaaaaggttctggaactagatagtggcagttgcacaacatcgtgaatatcccccaaactactgaattgtactctaaaatggctacaatggtgaattttatgtgaattttacctcaattaaaaatttcagaaagaggccgggtgcagtggttcacgcctgtaatcccagcactttgggaggtcaaggcaggcaggtcacctgaggtcaggagttcgagagcagcatggtcaacatggtgaaactgcgcctctacttaaaaaaaaaaaatacaaaacttagcgggacgtggtggcacgtgcctgtaatcctagctactcgggaggctgagacaggagaactcttgaacctgatggaggttgcagtgagccgagatcgtgccattgcactgtccagcctgggcgacagagcgagactccgtctcaaaaaaaaaaaaaaaaaaaaaaaaaaaaaaagaaagaaagaaaaacaattcatcggcaaagaagggagaagagagtcccaggcaagggaaagggccggcacagaagccagcagcgcgggatggcttctgggagctgcagactgcccagagcactggcaagagagaaggctggacacggccctgagtgccaggaaagggatttagaatttcctctgcgccaacaggcagcccacggtggctcttcagcagggaaatggagtggtcagatttgcacactgggaaggcttctagggcttcgaaggagaagggggatgtgcggggagggaattggaggtgggttcaggggctgagagggggaagggtgatgtgggggtagggataattggaggtgggttcggggactgtgagggggaaggggatgtgagggtggggattggaggtgggttcggggactgtgagggggaaggggatgtgcaggggaggggatttgaggtgggttcggggctgcagggggaagggatggggccaaggagttaggaaggggaagtgaggagaagtgaggcactaggaaacccaagattgaagagaggggacgtgggaggtgagggagagaaaggagggagacaggttagtggctcaatactggggctcaccagggtggaaagccctagggcaggagcgctctgggaagaagatgaagaataggtccagaatatgagtcggaggtgcctgagagacatccaggtagggacaggagggtcagcctaaggggagggtctgggctggtgacaagaccctgggctcaaatctgagggcttggagagtacaggtgccagatgattgagatctcccagaacgacagatctgaaaccttgtgacaccaacagcggtggtttcatgggctctgaagccagtggcctgggctcgaatccgagcactgccatttacaagctgcatgatgttgggcgaattactgaatctctctgagtctccttcccctgtttctaaagtggaaggaatccattcctatctcacagagttgctgggaagattcagttagttaatatttgcccagggcttaggtcagtgcctggtgactgcttagcaaatgttagctactatttagtagctaactaatgattcttattcaagaatcatttagggatcttattaaagagaaagagtcctgggccccacccccagagatgctggctgagacagagtcagatgtggcctgggaatctgactttggttttttttttttggagacagtgttttactctgttacccaggttggagtgcagcggcgtgatctcagctcactgcagcgtcaacttcccgggctcaggtgactttcctgcctcagcctccagagtagctgggattacaggcatgcgccactgtacccggttaatttttgtattttttgtagagatggggtttcaccatgttgcccaagctgttctcagactcccgggctcaagcgatccgtccacctctgcctcccaaagtaccggaattataggcaggagccaccgtgctcatctggaatctggcttttaacaggcatcccccaacctaccctatgtcattgtgaggcaggtggtcactggacctcacagccttagtggagtggaaggagtagactacagggttccaagctgcccaaattttgagggacaggctgagaagcccaggacacaggacaacgcagagatgtgggaggaaaactggtgagaaaggagacccaacaaatgacagagggtgggctctcgggagaagtgggggagccacggggtcgcatgctgctgaaagacccagctagagaggacagaggagcctctctccggggaaattgacaataagaaggtggctggtgactctgggaggagctatttctgagaagtggtggaaccagggccagagagccatggcttcaggactatgtggggtgctacggactgcactgtgtctccccaaacccccatgttgaagtcctaacccccggtacctccgaatgtggctgtatgtggagatagggcctctgaagaggggattaaggtaaaatgaggtcacacagatggccttaatccagtacggctgacaccctaataagaagcaggaatttggacagacacatagaaagggaatactatgtaaagacacacagagaagacaccgtctacaatccaaggagagaggcctcagaaggcatcaaccgtgctgacactgcggtctcacatttccagcctccagaattgtgagaaaattagcttctgttgttggagcgcccagtctttggtgctctgctacagcagcccgacagactcacgagtaaggcagtgagtcagcaatgctctgacagagtccagatgccacccaaaatctgggcgaagcccctgacaagaaagaccaaagtcaacaaacagaaaaaagcaacttggtgaactttgattatcttctttttttttttttttagacagagtttagctcttgttgcccaggctggagtgtactagcatgatcttggctcactgtaccctctgcctcctgggttcaagagattctcctgcctcatcctccccagtatcttgaattacaggtgcctgccaccatacctggctaatttttatatttttagtagagacaggatttcaccatgttggccaggctggtctcgaactcctgacctcaggtgatctacccaccttggcctcccaaagtgctgggattacaggagtgagctacctcgcccaaccaattatcttttatgaatctgtaagatggagataatatatcttacagcagaattgtaaacgttcagcagagcatatggagtgtataatcagtgctcaaggatcctaaagagggccaggtgtggtggctcatgcctgtaatcccagcactttgggaggctgtggtaggaggatcacttgaggccaggagttcaagactaacctgggcaatatagcaaggcctcatctctacaaaaagaatttaaaactagctgggcttggtggtgtgcatctgtagtcctgggagatactggggaggctgagcggggaggatggcttaagcccaagtgtttgaggttacagtgagctatgatcatgcctacagtgagctaggatcatgtactccatcctgcgtgacagagcgagaccctattggaagaagaaaacttcaaaaatgagtgacaatctcatcaatatcctcagcgagataagagaattgcaaccacaaaacaagaacaggatgtaagaaaaaaggaatattcagagaacagaaaagagcccatgaaaattatctacatattattaatatattattaatattatctaaattatgttatttatatatcatatttatggacaatatatgagtggatatgtaatatatatttacacttacacacatacatatagaaattaaaacctcaacataaggattagaagataaaattgaaggctgggtgaggtggctcacacctgtaatcccagcactttgggaggccaaggtgggtggatcacaaggtcaggagttcaagaccagcctggccaacatggtgaaaccctgtctctactaaagatacaaaaaattatcaggtgtggtggcacatgcctgtaatcctagcttctgaggctgaggcaggagaattgcttgaacctgggaggcagaggttgcagtgagctgagattgcaccattgctcttcagcctgggccacagggtgagactccatctcaaaaaaaaaaaaagaagaagaagataaaattgaagaaatgacatggaaaataaaaaagataaggaaatgtcacagatccagacagaaggatctgagttataggagaatatctgagttataggagttccagaaagtgagaacacagaaaatggagcggaagtggggctgggcgtggtggctcacgcctataatcccagcactttgggaggccgaggcaggcagatcacgaggtcaggagattgagaccatcctggctaacacggtgaaaccccgtctctactaaaaatacaaaaaaattagccaggcatggtggcagacgcctgtagtcccagctacccaggagtctgaggcaggagaatggcatgaaactggaaggtggagcttgcagtgagccgagaccgtgccactgcactccagcctgggcaacagagtgagcctctgtctcaaaaaaaaaaaaaaaaaaaagaaaatggagccgaagaaatcatcaattatataatccaagaaaatgtctcagaactgaaggacaagactttacaggttgaaagggcttaccaggaagccagaataatggatgaaaacagattcctatcaaagcatatcattgtgaagatcagcaacaaagagaaggttctacaagttcccaaaaatggaaaatataaaagggcaggtatgtgggaaagatcttatacaaaggaatgggaatcagactgacttcgtacttctcagcagcaacactggaagctagagaatgatggaactgtgcccttgaaataaactacaggcattcaatgcatagcaacatttcagtcaaccattgactgcatatacagtggtggtcccataagataccatatttttactgtacctttcctatgtttaaatatgtgtaggtacacaaatacttaccattgtgttataattgcctacagtattcactacagtaacatgctgtacaggtttgtagcctaggagcaccaggctagaccatacagcataggggtgtagtaggctgtaccatataggtttgtgtaagtcactctatgatgttcgcacaatgacaaggttaactaatgatgcatttctcctaatgtatccctattattattattattattattttttttttttttttttgagatggagtctcgctctgtcgcccaggctggagtgcagtggcgcgatctcggctcactgcaagctccgcctcctgggttcacgccattctcctgcctcagcctcccgagtagctgggactacaggcgcccgctaccacgcccggctaattttttgtatttttagtagagacggggtttcaccgtgttagccaggatggtctcgatctcctgacctcgtgatccgcccgcctcggcctcccaaagtgctgggattacaggcgtgagccaccgcgcccggccaatgtatccctattattaagcaatgtgtgactgtatttccaatcttcattttatgcccagccaaactacaaatcaagtaggaaggtagatagactaaaggcattttcaaacatgaaaagtttcaataaatctacttcccttcctttcttccctattctctttctcattttggtagagcacatcttccacccttctcaagaaagggaaatcccaggacaaaaaaagcaggaaatccacctctggagagagacaagaagtgatccgaaggtgttgcttgaaggaatagccgaatgatctaatctgtgccctgggcagaaagggcagtcaaaccagattggagctgggcagaaggtccctcaagtgatttcatcaagatgaaatttatagaacacacaatatgtaaaaaagatgtgagagtagattcaaactactggcagaaggcttgggtttgaatttgggacaagtacaaccaaaccaaaccaaaccaaaccaaacgcaatcacttctagctccagggaggacacagagtagtgcaggaaaggacatttcctctctgtaccctgtgtggctcagctgccaggggcatttacttgggcatgataaattgcacactggatattggttgtgttggttcagatcacccaggactcagttcctgagctgtattcaagagtgtaagaagcatattggtgaggaacacctgtgaacaataaaaggtgagaggccgggcgctgtggctcactgtaatcccagcactttgggaggccgaggtgggtagattgcctgaggtcaggagttcgaaaccagcctgaccaacatggtgaaactctgtctctactaaaaatacaaaaaattagccaggtgtggtgatgcatgcctgtaatcccagctactagggaggctgaggcaggagaattgcttgaacctgggaggcagaggttgcagtgagctgagatcgcaccattgcactccagcctgggcaacaagagcaaaactccgtctcaaaaaataaaaataaaaataaataaaaggggagaaagcaggccttggcaggggggagcctcagaccatgatgtaaatctccccagtcaggagctccaaagccaagactgcccattctaggagtcccatgctagacaaagacagctccaggaccccactgtgctcggtccctggttgggggcttccctggttaaggaagcagttatttggtgtatttctccacatgtgttgctataaaggaatacctgaggctgggtaattcatgaagaaaagaggcttatttggcttctggtcctgcagactgtacaaaaacataatactggcatcttcttccagtgagggcctcaagaagtttccactcatggtggaaggcaaaatgggagaaggcatatcacatggcaagagaggaagcaagagagagaggtggaggtgccaggctctttaaaacaaccgggttggctgagcacagtggctcatccctgtaatctcaacactttgggaggctgagttatttacttccaagatacaatggtggtacagggattgggtaaacattcccattccaaaagagagaaattggtcaaaaaaaggggcaacaggccccatgaaagtctgaaacccagcagggcagatgttaaattttaaagctccaacataatgcttgagtctatgtccggcatgcagagcacactggcacaaggggtggggcttccaaggccctgggcagttccacccccgtgtatttgcaagatgcggctcccatggctgctctcatgggctggagttgagagcctgtggattttccaggctcaggatgcaagctgctggtgagcctaccattttcaggtctggagggcaatgacccttccccacagctccactagccaatgccctggtgaggactgtatggggcctccatccccacatttcccctccacactgccccacagaggttctctgcaagggctccacatctgtggcaggcttctttctgggtacccaggctttatgatacatcttctgaaatccaggcggagctgccaaacctccttcactcttgcactctgtgcacctgaaggcttaacaccacatggaagctgccaaggcttatggcttacaccctctggagcagcagtcagagctatacccagagccctttgaactgacgctggagctggagcagctggggtgtggggagcagtgtcccaaggctgcacagggaaacggggccctgggcctggctcccaaaaccagtctttcctcctaggcctctgatcctgtgatgggaaatactgtcctgaagacttctttttattttttatttttattattatttttttgagacagagtctcactctgttgcccaggctggagtgcagtggtgcgacctcagctcactgcaacctcctcctcctgggttcaagtgattcttctgcctcagcctcccgagtagctgggattacaggtgcctgccaccacgtccagctaatttttgtatttttagtagagatggggtttcaccatgttggccagtctggtctcaagctcctgacctcaagcgatcttcctgccttggcctcccagagtgctgggattacaggtgcgcctggccctgaagacttctgaaatgcctttgagaccattttctcatagtcttgcctattagcacctggctctcttttagtcaagctaatttctctagaaagggcttgctccacagccagttagtattcctctcctgtaaatgttctttccctctctaccatataggcgggctgcaaattttccacagttttatgctctgcttcccttttaaatataaattccaattttaagtaatttctttgctcccatatctgatcacaggttgttagaagcagccaggccacatcttgaatgttttgctgcttagaaatttgttccaccaggctgggcacagtggctcatgcctataatcccaacagtttgggaggccaaggcgggcagatcgcttaagctcaggagtttgggaccagcctgggcaacatggcaaaccccatctctacaaaaaatacaaattagccatgcatggtgtcacacatctgtggtcccagccactcaggaggctgaggtgggaggattgcttgagcctgggaggtgaaggttgcagtgagctgagatcgtgccactgcactccagcctgggtgacagagagagactccatctcaaaaaaaataaaaaagaaaaagaatttttttccaccaaatacgctagatcaccactctgaagtacaatcttccaccaatcccttgggcatggacacagtgcaaccaagttctttgctacagcatagcaagagtgacctttgctccagtttctaataaagtcctcatttccatctgagacctcatcagcttggccctcactgtccatatttctgtcagcattttggtcacactagttaacagttctctaaaaagttccaaacctcccctcatcttcctgtcttcttctgagccctccaaactcttccaacctctagccattacccagttccaaatctgcttccacatcttcatgtatgtttatagcaacacttcactccttggtaccaattctgtattagtccatttctgttgctataaaggaatatctgaggctgggtaatttataaagaaacaaggtttggccaggcgcggtggctcacgcctgtaatcccagcactttgggaggccaaggcaggtggatcacctgaggtcgggactccgagaccaacctgatcaacatggagaaaccccatctctacaaagaatacaaaattagctgggcgtggtggcacatgccagtaatcccagctactcaggaggctgaggcaggagaattgcttgaacctgggaggtggagattgcggtgagccgagatcatgccattgcactccagcctgggcaacaagagcgaaactcagaaagagagaaagagagagagagagagagcgacaagagcgaaacacagaaagagagagaaagagagagaaagaaagaaagaaagaaagaaagaaagaaagaaagaaagaaagaaagagaaagaaagggagggagagagaaaggaaagaaagaaagagggagggagggagggagagaagggaggggagggaggtttatttggctcacggctctgcaggctggtcagaaagcacagggcttgcatctgcttctggtgagggcctcaagaagcctctgatcatggtgggaagtgaagagagagcaggtgtgtcacatggtgagagggagcaggagagaaagcaaaggaggtgccaaatctcgtgtgaattcattgctgtagggagggaccaagccattcatgagcgatccaccccccatgaccccaacacctcccaccagcccccacctcatatactcatatatatatgcacacacacacacacacacacgtgtgtgtgtgtgtgtgtgtaaaataggtatataggctgggcgtggtggctcacgcctgtaatcccagcactttgggaggccgaggcgggcggatcacgaggtcaggagatcgagaccatcctggctaacacagtgaaaccccgtctctactaaaaatacaaaaaattagccaggcgtggtgccaggtgcctgtagtcccagctactcaggaggctgaggcaggagaatggcgtgaacctgggaggcggagcttgcagtgagcagagatcacgccactgcactccagcctgggccacagagcaagactccgtctcaaaataaaataaaataaaataaaataggtatatatatatatatatatatatatatatatatatacacacacacattatatatgtgtgtgtgtatatgtgtgtgtatatatacacatatatatacacacacacacacacacacatatatatatatatatatatatatatttttttttttttttttttggagacagggtcttgctctgtctcccaggctagagtgcaatggtgcgaccacagttcactgcaacctcaacctcctgggctcaagcaatcatcttacctcagccttccaagtagctgggactacagacatgtgccaccacatgtggctacttttggatcttttttttagagatggggtcccactatgttgtccaggctggtctcgaactcctgaactcaagcaatccacctgtcttggcctcccaaattgttgggattacaggtgtgagccacaatgcccagcccccatatctaatattggggatcacatttcaacatgaaatgtggaggggacaaacatcaaaactttctcactcggccagtgtattcattttcagtggctgctgtaacaaagcaatacaaacaaggtggcttacaacaaatttattctcttgaagttctggagctggaggtccaaaatcagggtatctgaaagggctgcattccctccagaggctctagggaaggatcttttcctgcctcccagcattccttggcttgtggctgcatcacttcaatctctgccttagtcttcacatgggaagatgtgtgtctctgtgtcctcccctgttttttttttttttttctctttttttttttttttttttgagacagggtcttgctctgtcatccaagctggagtgcagtgctgtatccaagctggagtgcagtggtgcgatgatagatcagccttgaactcctggcctcaagtgatcctccttcctcagtggtctcccaaagcactaagattacaagctaaatccagaatgatttcaccttgagatctgtaactaattatatctacagagaccctgtttctaagtaaggtcgaatcctaacagtcaggttggacatgaattttgacactattcaacccattacatccagggtcacactgtaatctaccccctccctctctcatctcatccccagccttttccacctggccagtgccaacctctggcctctgctctttccttggggcaccctcttcctttcaaccctctacccagtctgagcctgctcacccctcctggtatccttcccatgtctcatgctctgcctcttctcatttgcagtggtgaccccccctcaattcccactgcccccctgcattgaccaaagtcaagtggcctacagcccctgtccctacctccttttcatatgctttcctgaatagtgagtctggaaacctgaaatcatagtcccagactcccttgcagctcggttctagatgtgaacttggctctgaccattagattcactgacatgtgtgaccagaatgctttctggtgggaaagtgtgggagaagctcctccctgctgcaaaggcacgtgtccctacagcagtgtcactggctccagctgcagctttgtgagtggtgagagggtctcactctgttgcccaggctggcatgatctcggctcactgcaacctccgcctcccaggttcaagcaattctcctgcttcagcttcctgagtagctaggactacggacacctgccaccatgctctgctaatttttgtattttttggtagagatggggtatcaccatgttggccaggctggtcttgaactcctgacctcaagtgatctgcccatctcggcctcccaaagtgctgggattataggcattgagcctctgtgcctggccagcttttaagaacaaagtttgcacctgggcagtgcatggctcatgcctgtaatcccagcactttgggaggcagaggcaggaggatcagttgaggccaggagctcaagatcagcctggacaatatagtgaagtaccacgtctctacaaaaaaattaaaaattagccaggcatggtggcacacactggcagtcccagctactggggaggctgaggcagggggatcacttaagcccagaagtttaagactgcagcaagttgtgattgcccacactgcactccagcctgggtgacagagcaagaccctgtctccataaatcaatcaatcaatcaaggtcgcacaatgtctttttagatacgacaccaaagggacaatctgtgaaagaaagaattagtaagttggacctcattaaaataaagaacttctgctctgctctacaaaaggctgtcaagagaatgaaaagccaagccagagactgggtgaaaatatttgccacagacatatctgataaagggctgttatccaaaatttatgaagaactcttaaaactcaacagtaagaaaatgaacaatccagttaaaaaatagggatggatgtggtggcatactgctgtagtcccagatactaaggagggtagggcaggaggattgcttgatcccaggagttcaagttcagcctgggcagcatagcaagaccccatctctaaaaaacaaaagatctaaacagacacctcacccaagatacacagaaagcaaaaaggcatatgaaaagaggctcaacatcatacatcatcaggttaatgcaaattaacacaacagtgagagcctctacacacctatcagaatggccaagatccagaatgctgacaacatcaaatgctggtgaggatgtggagccacaggaactctcactcatgctggtgggaatgcaaaatgatacagccactttggaagacagtctggcagtgttatggactgaatgtttttgttctctcaaatttcgtatgctgaagccccagcccactttgtgactgtatttatttggagacagggcctttatggaggtgattaaggctaaatgagatcatagggatggggccccaatccaataggatgagtgtctttataagaagagacatgagagcaagctctgagctggctgcctctctctcttccccaccccaccttgtgaggacaaagcgagaaggcagccatctctgagcccagagaagagctgcgggattaaacctaccttgcccacactttgatcttggacttccagcctccggaactgtgagaaataaatttctgttgtttaagccacaaagcctgtggtattttgttatggcagcctgagttaagacacgcaattttcttacaaatgaaacagattcttaccatgtgatccaacagtcatgcctcttggtatttacccaaataagttgaaaacatatatccacaaaaaacccagcacacagatgtttatagcagcttttttcatagttgccaaaatttagaagcaaccaagatgtccttcagtaggtggatggataaataaaccgtggcacacccagacaatgaaatattattcagcgctaaaaagaaatgagctagtaagccacgaaaagacatggaggaatattaaatgaattttactaagtaaaagaagccaatctgaaaaggccacatactgtgtgattctaaatatgttacattctggaaaaggcaaaactatggagacagtaaaaaggtcagggtttgtggccagggcacagtggctcacgcctgtaatcccaaaactttgggaggccgaggtgagcagatcacgaggtcacaagttcaagatcagcctgaccaatatggtgaaactccatactactaaaaatacaaaaattagccgggcgtggtggtgcatacctgtagtcccagctactcgggaggctgaggcaggagaattacttgaacctggaaggtggaggtttcagtgagccgagattgtgccgctgcactccagcctgggagacagagcaagactctgtctcaaaaaaaaaaaaaaaaaaaaaaaaagtcagggtttatggggaagatgaataggcagagcacagagaaattgcaaggccgtggaacaagtcagtatgacccatggcattataactacagatgaacaacaccaagagggaccctaacctaagccacggacttccagtgataatgatgtgtcgatgtaggttcaggactggaacaaatgtaccatctggcggggggtgctgacaatgggggtggggagctgtgcacatgtgggggcagcaaggacatgggaaatctctgcaacttccactcagtttggctgtgaatctaaaactgctccaacaagaaagaaagtctattaaaaaaaatacatacatacataaagagcaaaagttgatttcttgctcatgctacgtctgaccagggagcaggaagacactacatggtgcagccagtctgggtccaggctgactgagattctgttttgatggggtctcaccagctcagggaaaggaaagtgaagaattgcacaccaactccggaagctgcttccgggaagtgacatcctcatttctgctcacatttcattggccaaagcaagttacagacagccttgaccttgaagcgcgtgaagaagcgcacttcaccttggctggtgccaggaaggagaactggggtgctcatgccctccatggaccaccacattctgctaaaaacactcagcatggtgtgcactgagccctgcctcacacacatgcgcacgtgcacacacacacacacacacacacacacgagcatacgcacacacccctcctggtcaagcccctgacgcttttgcctggtctttcctcagcagctgagaacaagggccctcagttttggatgcgaagcatttccagatcggttgatcaaatatttactgagaaattaccagctgggcacagtggctcatgcctgtaatcccagcactttggaaggccgaggcaagtggatcatctgaggtctggagttcaagaccagcctggccaacatggtgaaaccctatctctactaaaaatacaaacatttgctgggcgtggtggcatgcgcctataatcccagctactcaggaggctgaggcaggagaatcatttgaacccaggaggcggaggttgcagtgagctgagatcgcgccattgcactccagcctgggctacaagagcaaaactccatctcaaaacaaaacaaaaacaaaaacataaacaaaaaagaaaataaactactatattcacggcaaagacagattaaggacaaggcagttgaaaatgaaatgacaggacctgaagaaaagtgtgtttcccagagctgctctcacgagctctccgggaggtgggagggtcactcagccccaagctttgtgagatgttgggtgttggtgtgtggccaggtatatttacgtataatttacatacaattaaactcatcaatttttagcatacaattctatggattttgacaaatgtgtcaaatcacataactgcctcaagcccccttgtggtcaggtcagccttttccccatccccagttcctggcaaccgctgattagttttctgtccctatcattttgtcactcccggaatgtcacataatagaatcctgcagcctacagcctttcaaggctggctacttttgctcagcataatccacttaagattcactgatatttttgtacgtaccagtagcttgttccttttttttgagacggagtttcactcttgtggcccaggctggagtgcaatggcacgatctcagctcactgcaacctccgcttcctgcgtttaagcgattctcctgcctcaacctcccaagcagctgggattacaggcatgcaccaccaagcctggctaattttgtatttttagtagagacagggtttctccatgttggtcaggctggtctcaaactcctgatctcagtgatctgcccgccttggcctcccaaagtgctgggattacaggcatgagccaccgcgcctggccatttgttcctttttattgacaaatactatttccttgtctggacataccgcatgttgcctctccattcatcagtggatgaacaatgggctgttttcaccagtgcacttgccttggaatccacaaactgcaaatggcagtggccttgcccatcccacccacaccgctgcagtgcgcggcctgctcgttgggccacagatacatgaacctccacctgcctcagggcctctgcacttactgttgcgatgcttgcgatgctcttcccatgactctggcctccttcctcagaacctctgctcataagtcacctctctgaccaccctgtcctcagtttccaccccatcactctctgtgccctcctcctgctgttccttctcccagcacccactggagtctctggttttgtttgcttgtttgtgtattgtccatctcccaccagactggagactggagaccctcagcggaggaagtctctgttcatggctgtatccccagggcctgacacagagtggactctaaatatgagttgagtgagcagctgctggtacaggatcacaggaggattaaatgaaatagcgagtgtgagtgccctttgcaacctgctgtgcttattgagggggaaacaggctgagaaaggtgcagtgaccaacccagggccaccaggtcagagcgatagacacccaggcctacacccctccctgggccaccctcctgtccaccctgcctcagggccagcgttcctaaggcacattacacacacacacagcccacagacacccagaccgcacacacagctcaacaccacacacagacaaacgccctcaatgcagacatgcccagccttgcacacacaggaagtccacacacaaacaccagcacactgccttgaacacgcaggaatagcattcacacgcccatccccctacacaaacacacaggccacacccacacgccaaaacacacccccagcgtcagaccttgatgactgacagcccaggactccagtgggcttgcgtcgccataacaacagacggctccgagtcttgggctgtgagtgtggtcgggctgtgagtcacagctgcagcagacgctccgcagagcaggagcagcctggcccagtgcggactccccagtgccaacctcttatggacgcagagtggaccctctcagatgggtgtgcagtgtccattagcattacccacaggagggatgtggccctcaggtgtcccctgtgtgccacacactggcgtgcgcccagagcttcacacacattttcttgcttaatcctcgtggtgtcctcaccaaatcagtgtggccagggagaccattttacagatgttgaaactgaggttcaggtaggggaagtcccttgcctcactcaggtcacacagtgagtcaccaccaggcctgaaatttgaattcaggtctactgaaccatgaagggtcctctttccactgccctgaatccaatccaggggagctcccagctgtgcacaccatttccagacaagagcaatagattatcagctctcacttgcaccagagttggttctgcccttgtagagctcccttggtaggtagtgagatccccatcatgagcagcatccaagcagagactgtcatagctgctatggagaagcatcaagtatcaggggacaaggggttggaccagacggcctggctttgagttgtaaatgacaaaaaaaattattggcaaacaaaacaggaatataaaagcttcaggaacagctggatccagctgtcagatgtcatcaggaatcttcttctggatttccccttccttggggttcactttcttctcagaataaccttccctagcctagggtagacctcacagctgcaggcttacatcggtcgtggcccccaaaagcaagcttaatagatgtttgtcagatgaatgctagaagcatgataaggttgcgggtctcagtctaagtaaatcccaacttgacctctgggagtcactctgaggaggcgcagtgctcattcctgtgtgccaaatcccatcatctctcaaacgtcgtatgattgagttagattgtactatgcacttcacagacattaactcatggaaatcccaggcagccctatgcagtggtcacaatctccatctcatggacggggacacagggtcccaaagaggcaaagtgtggtacctgaggtagggctagagccacacagtgccttaccaggctgagatcaggaggccgtacctctgaacgagggcaggactgttcttcacaggcagctttcctccaaggaggcagaggacggcactggcacgttcactcagcagccaacattggcaagcacccactctaccccgtggcccggggtgccactgcccatggagcttggaggtgccaactgctgccagtgaccttgggtaagtcattttgtgcttgatccttgcatccccatctgtaaatgggcaggtcaccccactcagaggggcagaactcatgtcagtggttgaacgcttctggcagtacagcccaatagaacttcctataccaggtcccacagggtggccacacaccgctcctgaacaccagaaagtgactagtataataataacaattttaaaggccgggcgcggtggctcatgcctgtaatcccagcactttgggaggccaaggtaggcggatcacaaggtcaggagttcaagaccagcctggccaacagagtgaaaccctgtctctaccaaaaatacaaaaattacccgggtgtggtggcatgtgcctatagttccagctactagggaggctgaagcggaagaatcgcttgaacccgggaggtggaggttgcagtgagctgagaccgcaccatttgtactccagcttgggtgatagagtgagactctaaaagaaacacacacacacacacacacaattttaagttttatttcttttaaattgattgaaatgtacctagctacacgtggctaatgacaaccatattgagcagcaaagctccagggttctagacaaacagcagatattaattttggttttgttctgttttactaaccccaccccatgctccagtgcaggcagcctggtccctagcttgtctcagagagctttgctggcctcctttgccagacccggtggccagactcatcatggccttgggacctttgtgtggctctggagaagaaagaagctcccaataatggctgagattcagttgcccaccagccagcaggataggggcttagaacaggatgtaagatgatttaaagaaaaaaaggggctgggcgtggtggctcatgcctgtaatcccagaattttgggaggccgaggagggtggatcacttgaggtcaggagttcgaaaccagcttggccaacatgctgaaaccccatctctactaaaaatacaaaataattagccgggcgtggcagccggcgcctgtaatcctagctacttgggaggctgaggcaggggaatcgcttgaacccgggaagtggaggttgtagtgagccgagatcacaccactgaactccagcctgggtgacagagtgagatccatctcaaaaaaaaaaaaaaagaaaaagaaaaaaggaagctggctgtttctggcacacctgggttttccactgggtctataccaggtgcacaagtgcctactccccacctctatacccgcacaacccaccacgtggacatgcaccaaacacaccccccagctgtgtgtggacacaagcagccaacacatgctctgtggcttactcctcccatgctcctgggcctgggctgagggtccagcagttcacagaacatccacgtggtctgggcttccagagcctgtccatcctccatcccctctacctgcccaggatccccgggcccctgctggcctacaggagtaaatggccacctgcacaccctacacactcacgcccagctctggatggacatgaggcagggcgaggtctgggcggtagccaggaaatcctaagctgtgagtgttcgttccctgttgctgctgtaaagagttactacacatgtcggggcttagaacagcagaaatgattctcttgcagttctggagactgggtgtccaaaatcagtatcactggtctcgagtcatggcgtctgtggggctgtgccccctcggaggcgccaggggagaacctgtgcagggccccttgcagcctcagccagctgccctggtgatccctggctgtgtttgcatcactctggtctctgcctcggtggccgcgcagtctcctcctccgtgcttgtgttgtcgagtctccctcagcctctctctgttgtggacactagggacagcatttaaggaacccctagatagcccaggatcatctccttatctcaagacctttaactttgcacatctgcaggagcccattttttggctgtaaaggggacacccacacgttccagggatgaggacctggatatctttaggggccatttttcagcctaccatcatgagccgcagacactccgtggccagctcccaaacttagctctggctgtggggccgggtacagtgacagacctgagaccccatcagcgctgacaccataggccccaagagcctgtgaccatggctggtgagagctccccagaacagtggggctctcagagaagtagagtgaggagcacagagagacggatgggtaggtcctgggagcaggaaggtatgaattcaggggaggcacaccgtggcctccaagctgggcctccacagtgtctcacttcatcttcccacagcccttgacagattaggaaaccaaggctcacagaagcaacagctaagtcctctgtgcagcttacctctgaacggccccacagagaagctgttagcagctccaagttacagggggaggaagtgcctgctcagaggtgatgtgacttgcccaaggtcacacagcaacaggtggcagggcagaagcatgagccctctggctgactcaagcacccaccttcttggtgcctcaccaggttcccagaagccagagggtgagctggttttggagaatgaccaggatttggggaaatggagaaggagggtagatgaactttgagagctgagtggatcaatgggatttttttctggctttggagggaggtgacctcagcgtgggggtcagtgtctctgctattgggcaggttcctcctctcaggggccccagaacagactccaacaacgtccatcccagcaacaggtgggggtcttgggagggttatgtctaaagggctgtgttcaccccacagatgactctcaggggcctgccatggcccctccctccttggttttttctcccttttgtctgctgcccccatcccacaggccctggagggcagcaggaaggagaagggcaggggttgtggcatggctgagtgcaccctcatttctagggactcaggagagcagaaagagctgagtgccccccaggagcaagccaggaaggggccattcttgcctccagcggtggctgggagctggccccatcaggaatggggtaaggctccaaccagcagccctgagaccccagcctggccctctagggctgcacacagagttgcacacaccccacccacgtgtgtggacagatgcacacccctccctccttacacctgggcctctaacaacagttagatgccacagagggcctgggcacgccatctgttgttcaggccacaccctgctcttgctcaggtggaaaactctggagtgtcctgggctcctctcctcaccccacgtcagaaattcttgtctattctaccttcaaggtatatttggaattggaatcttttcattgcccacagccccaccctggccagggccccctggattcccaggcctcctgctcctgccctggcccctctcagcagccagggtgcactgtgaggacctaggggagatcccagctctccctgaaggaccccgtcactcagggtctgagccagaggccccactgtacactgtggccacccaagctggtcctgaccctctctgtccttgcctcctgctctctgcccccatgcattgctcttcagccccacaggcctccccactgctcccggcacactcctgcctcaggacctttacacctgctgtctcctcttcccagctccccacacatctgtcccctgcctccctcaggtctctagaggctctaagaccaccttctctcacctaactaacaagctgcttccccctcccaccccctcccgcaccccctgggacactcatcatccatagctcctatatttacctttctattttgtctgtctctctcctgccccagatacccactagaatgttggctccatgaggacatggatttgtgtctgcttcagtcactgttgcacccctacccagcccagcatccggggcattgcaggctctaacacctgtggagggaaagagtgcagacagagacaggcaggggcaggtgacctgtacacactcaaggcctagcggggcactggcacagctgcacatgcccacacctgcgcacacacacgcacacgcgcgcgcgcacacacacacacacgggccctgagctgaatgcccttggctcagtggggccttggacgacagtctggccctggctcttgggcagctggagtctttgtcctcacccaagactgccagcccaccccagctgtggctgctgatgccccagatgggcctgcacttctgaagagaaaggaccagtttcctgcagccaaacctccagtgcagaccacagagcagccacggcatctgagctcctctctccctcccgcctctgcatccctgactcatcccccaccccagggaggcagcctaggcccaactgccccactgagcagaagggaaggctgaggcaggaggctgagccagccagctgcccccgttaaaggagaagcagatagacgtggcttccagcccagcccctccctggctcaagcggtcacctcccaaacagtctgaccgcagtctgtgggggctccctgggcacccttgagccatgcgtgtgcagccagtatgcacactcccgccagccggcccctccagcccagcttatcactgatgactttcccaacagagatcgatagaaaaccttttatctccttccccgtggtggctcagactcaggcctcagagcagagctggctcctgttactatggtgaccctcaaggacctcactgactccctcccattcacccccatccccactccctcctccctccatcctcccttcccctcccccactcccactccctccccatcccatcctcccttccccactccctgccccagcccctctcctactccctccccacccccatcccacagcctgggatcaatgctggttccctacagggcctgcacacctcccggctgctcatggctgacagggaggggcctggggggctccttgcacccacccaagccccatctgctcctggtctcgaccttgccagtcccccactttcatgccaaactacagctccagtgcccgattgaggcctcccacctgcccacaccgtcctcagcattctgtaactgctcacttatatcaatgagttgtttccccctccatacagacagatggcacccctccatacagggctgctgggagctgtgagcattacataagcacaaacctatgttgagtttggcctgtggctgatgctcaagatatactagccattgttaataagcctcaatttgtgcatttattaaataggtataaaaggtattatggttgtaaagattaaatgagagacagacacaaatagtttagctcacggcctggcacgttctaaacactacatccatgaagggacacacagcctcccttcttccttagcctcctttcttcctttgttctttgaaggtgtttaggtatggggaggaggtgggaggaacaggtgcatccccgccctccatggaggctccatagccttggcctgcagcatgcaggccaaggagaacaatgccccatcagggtccaagtaacctgtgccctctctctgcccacaaagctatattggttgtgcctcactttggcggaggccagattttcctcccatgttacccttgccttcctgcctggaggccggggctgctctcttccttctgcctggaatgccttgccatacggccagccccacaatcagggaaccatcttcaagggaagtgctatggcaccgagatctggagccagaccccccgggtccacattgcagctgtgccactgctaccctctgaggcagctgcacagaggcctcccaggaccccacaccctcatccccggagcctaccagtgctccctcaggtggcaaaagggtctttgcagacgtaattagattacggatcttaagattgttgcaggctatctggatgggccccaaatgtaatcacaagtgtccttgtatataagaaagaggcagagggagcttcgactgagaggaggagctacgccgatagaagcggaggttgctgtgatatgaggatggaagcaaggattctcccccagagcctcgaggaagagccagccctgcccacaccttgactttggacttccggcgtgcagaactgtaagagaatagatgtgcattgttttaagccactgggtttgtggtcatttgttccagcagccgcaggaagcacacacacacgctgcctcctctcctcatctgtaaaatggggctggttcaggacctcccccccgggttcttgggaagcataagcgagttggaaggagcaaaaagcttagaaaagtcagggatactattttttaaattgctatgccacagcgatttgctgaggaagacagcattcctcctgccttcaagaaattcgccacctggagcaagggagactcacaaagaatcatgatcccagaggctgttagaggcttgtagagtaggcctgggcacactgcccagggagcgggagcctgatttgaccggggggcctgggagggcatcctggaggagcccactcttgagctaagcctggaaggatatggagggaggagccagacagagcaagaggggaagggcatcttgggcagagggaacagcacgtggggctgctcagaggagtaagggaagaggtagttgaggaacctgcaagtcagtctgcagggatggggccttgggggcatcacggaggtgggggcaagccagggagccacatactggaaaggaacaattgcttgggccaccgtgaggagggtgaatgggggtttgagaccgaaggcaaggaaaccagttgcagagattgtggtctggcaggtagtgaagggtaaaatcagtggaatttcaggacaacctgaagaaggtgggtgagcagaggcagtggagggttggcaacttcctgccaaggggaagggatgggggtggagcaattcccgagatggcaatgacagtgataatgacaactagtgctaaaattagtgcttactatatgccagggaatgtgcaaagtgcttgatacgccttatctcagtctcaatcctggaattgtgattatcagcagggaatagagcccagagatggaatccagagctgggaacagcgaggtgtgggaggctgggtggcgggggtggggaggggaggtgaggaaatggctttcatataaacaagatgaaaaactgttcagggactgctcttgtcatacttttctattattaaaaaagaaagaaaacacatgttttattagtagctaagcacttttatttaataacaaaaaatctgtagggcctgaaagcatggcaattctaacccctctatttaaaaaagacctctgaagtacatatcccttaggactgtgcatgggtagtcaaagcttaatgaccagcgggggatcaggagggtggaggggtctgtggtcagcagctcggctgtcctggtggttttatttcttgagctgacagtggtgaatgcaggagtgatcagtgaattatcttccataccttcttgaatatcttaaatattttataattaaagattgggtgtgactgatattctccggctctacatgaaagctggttggaggtactaagtcacattcacaaattacaggatctctgtcctcctagtcagcctgagtttctttcaccacatcctggctctgtttgcatacccccagaaacgggaagcttcctctctctctcttgaaattgcctggggccctctttgaacagctctaattgtgggaaagttcctcataaagagccagaagcctggtccagtccctctgcccactggaaccacacagtctgtgtgtgatcacacaaagcccaggcggccctttagatctttgaagacagtgctcattctccttttctccccattccaaatttttcttctctgtgtaaagtctcagttctttttcaggcaagtgacagaaaaccagctcaaactggtttatgataaaaggtgaatgtattggctcaagtgacttaaagtcctggggttgctgagcttcaggcgcagctgaatccaggtgcccagaaggtgtctccatgtctctcaactcctcattcttccccattggctctgttttcagacccacagtctcaacaactacccctggaggctccagcaaagctcagtgcttccagcaaaactcctggagggcttaggtcattcgaaccattcctgaaccaatccctgtggccaggcaaatggggcagtttggtcaaacctgagtcacgtgacaatctctgcatcctagaggtagggaccgcccagcctgaaccacatgggccataagtgggaaagaatggtgcccacaggaaaattgattgtaattaccaccaaaagactagatgtattaggtaggacagaggctttataacagagatccacaataacaccggcttaaacaagatggaattttatccctcgctaactccagatgcaagagatcttgggctgatacagttaattgtatgattagggtgccccatagctgagcattcattatctgagttggaagttaagagttgttaaaacatgaatatatttagtactgtcctggccacttacttcgttcccagtcaagcatctcaccctacctagcaccagcatctgtccaccccccatctgcatctcttctgtctgtcaggtctgcttatgcaagctggtagcaaaggaaaacttcaaagttgtagaatttcttgaagttgatgagagttacgttggagagctcctgggttctgcacacagtggctgacaaaccaaggatctatctatctggctgggtcagccctgtctaaataatgaaaacccccaacgtgaagaaagatgaacctgtgctttggaagaaaatgatttgaatgtcatagaactcagagtggcccaaagaactcagggggatgtgatgaagcattctggttgttaggacccagaaggttctagtaaggaccatcaggcaattttgtgggaagaactatgcctactccaatgaactttttgtactctaattgtcttactccattttctgatgctaaaacagaataccactctgggtaatttgtaaacaatagaaatttatttggctcatgcttctgaagactgggaagtccaagagtatggcaccagcatctggtgggggtcttcatgctgtatcatcccatggtggaaggcagaagggcaagagagcactagacagtgagcaagagagagctgaactcatttttacaataaatccagtgtcttgatcatgagctcactccttcaataaagagattaatccattcatgagggttttgcccttatgacctaatcacttcttaatagtcccacctcttaataccttcacaatggcaattaaatttcatcataaatcagccgggcatgatggctcaccactgtaatcccagcactttgggaggccaaagaaggcagatcacttgaggtcaggagttcaagaccatcgtggccaaaatggtgaaaccttgtctctactaaaaatataaaaattagctgggtataggggtggccacttgtaatcccagctactcaaaaggctaaggcaggagaattgcttgaacccaggaggcaggagttgcacttagccgagatcatgccattgcactccagcctgggtgacaagaacaaaactccatctaaaaaaaaaaaaaataaaataaataaataaatttcatcataagttttggaggggacagtcaaaccataacactaagtattagcacattaatctaagaattagcatattaacctaaatgttgtttgtggaagataaaatgtgtatattttcatagtttaaatttcatttttcaaaacaaaattccaattaaacatttttttcccaattactaagaaatgttggttcccagagctttgacttgtggtcaaagtggtctttttcttgggataatgagacccttctttagagtgggttcaatgtctgtctcacttgccagactatgggggctgtgtggtgggtcccacatcattattcctggagatggaatctagaatgaggtttggctcggctgcacgcagtggctcatgcctgtaatcccagcactttgggaggccaaggtaggcaaggcagatcacttaactcaggagttcaagagcagcctgaacaacatggcaaaaacccatctctacaaaaaatacaaaaattagctgggcgtgatagcgtgcacctgtagtccaagcaacttgggaggctgagatgggagcggtgcttgagcttgggaggctgagatgggagcgttgcttgagcttgggaggttgaggctgcagtgagtcatgattgtgccactgcactccagcctgggtgacagagtgggatcctgtctgaaaaaaaaatattgcctagagctaagtggggctctcacctgctccctctcttctctctgctagagaccagaggccttgaaggaaggaagcccaagggtctctcctggctctgcttccccatcactgcctccacttccccgcatccctttccctggcagaggcttcttgccacagggctctgggcactcacaagacctacaaaagaaaggttcacattcacatttgtcttctctgtagaagtgctggaggctgatggggtgagggggagcagcaacagttggtggtccagagttctacaatgttgaactgttttaaatcgtcataagcccaggaggcacggattgctacactcctcgttagaaaccagagtctcaaagagggtgaggaggtacccaaggccgtgctgttggtggcacggtggcagagctggggcaggagttctgattttccatctcattcctctgttactgtctaagcagagagcctgggtgacagctacctacacagaagaaggtattctgggagagtttcctcccctctctaggcctctatgttctctgcaaaatggagataataagactgaaatgcacatagtaggtgccaaataagtactagctacatgcttgctaatgggagtcctcctgcacactcacactctgcctgggctctgtaagaacagcccggagcctccatccagttttcatcgcagaggaggcggggcggcagcgtgggcaggagctcaggccaggagaatccctactctaagtatgactgtgtgatcttgggcaagtgacttcattccctaagtgtgtttcctcatctgaacaaggaggctattgaaatgcaggtgagacctagtgagacagcggctgcgggaatcacctggccacagtaaacgcccttgcatcctattgagtgagccaaggataagcgtggtccctggcagggtgcaggattctatcctgaaatacaccccctccactttctcctattccagtccaccggggcctctcctccaggcaggaaacatgatctccttttgacctatgagaaaacagacaggaagttcaaggccacacagatgtgagtgttaagaaccctggggggaaggtgtctgaaacccaaggctgtgtgtgtgtgtgtgtgtgtgtgtgtgtgtatgtgtgtgtgtgtgtgtcggggtgtgctgaggggttggtcagccaggtgatttaaatgcgggtatagaacaataggtagtggtggggccccgaagaacttagattccttaaagatatttattttctttctctttctctttctctttctttcctttcttttcttgcttttctctctcttattttttttttttgagatggggtctcactctgtcccccaggctggagtgcagtagcactgtcatggctcactgcagcctcgacctccctggctcaagcgattctcccacctcagccttccaagtagctgggactacagatatgcaccactatacctggctaattaaaaacaaaacaaaacaaaacaaaacttttttttttgtagcgatgagtctcactatgttgcccaggctagccttgaactctgggctcaagtgatcctcccgccttggcctcccaaagtgctggaattacaggcatgagccactgcacctggcaacgtatgtcaacttcaaaattttcactttttgctctgctttccaatcaaaacaaacctagcagcctgagttcggcctttgagctgcaagtttgagactctgccccaacactgactttattgagcctctgcattgcatagcgtgcacacccctgctcacccttctacctgtgtgcaactaaggatgacaagcagggtcagcagcagaagtgtcttggggctagctctgctgacagtgatccctgatcagttcctagttctcttctgagaagactgagccctctcaaccagcatcattcagagcagtctcaggatggttaggcctatggctgtcctcctctggaagggccctcgtttgttcagaagcctccctggttaaagcaggcagaggaaaatcactcttgaaagctcaactcactaatcacctcctccaggaagccttccctgaattccttgacaggactaggtcattactctgcatgcctgggcaccacagcactcttcatgggtaactttcacattgcaacccagggtctaacccagtgtctgacccacagtgggctctccatgcatgaaatgggtgactaaactcacctgctgtgtgactttggatcagtgacttcacctctctgagccttgattttcttatctgtaaaatgagttgaggcaagacagcattcagagggtccttgcagatgtgattaaataaattaagagtcttcttgagatggagggattagcctggattatccaggtggaccggaatggaatcacaagggtcctcatgagcagaggcaggaaggtcaagggaggaagtagaagctgggacaatggaagcaattgttttcttgcctgttctagcttctggaggtcaccaaggggtcacaagctgagaaacacaggcaacctccagaaattggaaaaggcaaggaagagattctctcctggaggcaccaggagagctagcccagcccacaccttggctttagcccagtgaaactgattttggagttctgacctccagaactgtaaagaataaatctgtctaggctgggcaacatggtgaaacccactctccacaaaaaatacaaaaattagctaggcttggtggtgtggtatgtgcctgtggtctcagctacttggaaggcagaggcacgagaatcacttgaacccgagaggcagaggttacagtgagccaagattgcgccactgcactcaagcctgggcaacagagcaagactctgtcataaataaataaataaataaataaataaattaattaattaattaatttgtgttattttaagccacttgtggaatttgttacaacatccctaggcacctggcacacagtaggtactcaaaagtggcagttctggtcaggcgtggtggctcacacttgtaattccagcactttgggaggccaaggcaggaggatcacttgagcccagaattcaagaccagcctgggcaacatagcaagatgccatctctataaaaaataaattggctaggcatagtggtgtatgcctgtggtcccagttactcagggggctgaggtgggagaactgcttgagttcaggagtttgaggctgcagtcagctatgatcacaccattgcactccagcctgggcaacagagtgagactctgtcttacacacacatatacacacattcacactcacacacaaaagcagttgttagtaccttgaccgcacaccctcttccatctgcctgcatattccttcctcctctcactctctgggacacccatcccctttgcaacccagggctcccttcctgcccatcctctgaggtctgcctcaatcgccacctcctccaacccttcgctgaactgacatccagaaatgctaatcccttgaacaaatgtgcttccttgagtggtgcctgagctatggctcccaaagaggccaggcttgtgatcctctttgtacccccagccctgcctacagggtccagtggccccagtcatgtaaacttgataccaaggaattttcaaaacaaaaaatacctaattccaaggccagaaaattgactctccttggggttccagctggtctcccaccctctccaggtggagaagctagtcttggggacccttgtgtgggaaccagaaatctcccagcaagacctccttgtcttgcctcccactggggtccctagaaccagccttcccttaggctccactcaggagcaggttaaggtaaggcagggagggcaggagaccagctcggggtggagattgggagccctggatggatgatagggactgttcccattaatctagcatcttaaagcagtaatagcacttactgcatgccaggctgtgagctaaatgctttccacacgtacctcattcaatcctctcaacagacccatgaggtaggtactattatccccattctacagatgaggaaacggaggctcagcaagttaagtagtttgcccaaagccacccagctgggcatagaggagccacgtttagaaaccagatttgccaggcgcggtagctcatgtctgaaatctcagcactttgggagtccgaggcaggtggatcacctgaggtcaggagttcaagatcagcttgaccaacatggagaaaccctgtctctactaaaaatacaaaattaggtgggtgtggcggtgcatgtctgtaatcccagctactcgggaggctgaggcaggagaattgcttgaatctgggaggcagaggttgtggtgagccaagatcgcaccattgcactccaggcagggcaacaggggcaaaactccgtctcaaaaaaaaaatacataaataaataaataaaaataaaccagatctgtcatccagaaaccgcacttaaaacaagcttaaaacaacacagttcgcactgggatccagctctgtcttgctcttgacattcaccctgggagacgggtagccaagtccagtaggaaggactgtggggacctgtgttgattctgtcctgtagcttgagaacctggacaggggacttcaccactctgcgcctgtttcctcatccacaaaatgtgatgagccgacctcacagagggggcaccaggatctaatgagaccatgcacagaaggggcacagcaggcctgggacagagtgagggccccccatctatcacaataccttattttgcagatgcaggattcacttgtcccaggtcacccacaagctctgatgccttgaccagctcccctctgccctaccaaaggacaaatgagggaggcttcgatggggctgttaatggggtcatatcccacagaccctagagcctgggtggggctgagaggcttcccaagcaggtggcagtgagctcccacctgagctatggcaagtagagacctaggcatgaaattgctccgaggtctgtaccttaagtttcatgcaaggactctctcattcaacatgcctctgtttaaagtctgccagtggctaccttccttgcactagaattgcaaacaaattcctcactgagctctctgcagccctgcaggctctggccctcccgatatggctctgacttcaatgtgcccattacttgtccccttgctgacggcctcctcacaattccacttactcaccaagttctctcctgcctcaggacctttgcacttgatgttctttctgccaatgatgctcttcccaggagggcaggcccctgtagtcccagctactcagaaggctgaggtgggaggactgtttgaggccaggaattcaagttcggcctgggcaacacagcaagaccctgcctctaaaagaacaaaatgctcttcccagactctacccatggcggttcctcttgctatttagatctttgcacagacaggcctccttctctctcccccagccaaggagccctagccgtcacttcacctgctaattttcgtcctagcacttactgctctaaaattatcttcgtcatgtatctaagcatttgtttgctgtctgtctcttcccaccaggatgccagctccacgacagcagggaccgcattgtctctgctgattcctcaagactcagcaaggtgccaggtgcccagtaaatgaagtttacatgaagccaatggagttttgaaatcgaaaatgtttctcaaactgcaaagaagtgggcacaggtgagggctaatggtggggtgagggtgggggcctggcctgacgctggaagctcctgtacgcagggcgctagtgtcctcccaggccgcaccgggatcccaccgcagaggccccctcccgcaggccggccagcgggcggggggcgcgcagtggggcgcgcggaccgccagggggtgctgtcggggcgcgcacggcccacctggcgcccggggccgcgagcgagcgcagccaggccgcccgggaacttttttcctcgcgctcttgctctccttctccccccgcgcgtcgcccgcccgcccgtccgctcgtccgctcttcctgtgcggaggggatcgcattcctcgcggcacccgcggacaccaggcaggcccggccgggtgcgcggccaaggcccgctccccgcgtccccgggcgccgcccccgcccgcggctgggctccgagagacgagtgggagagcgagtgcagcgagggcgagaggcgagccgagcaggccgccctgcccgcggccctagcgccggcgcgaggagggggcgccgcggcccaccctccttcctgcctggccgcgggccggccgggccgccgcgccccgacccccatggccacccaggcctccgggccgcgaagtcgcagcgccagacccaaggcccccgagtgagcgcgggcgccgaggtgagcagcgagcgccggggcgcggggggcgcagtgtatcctgccccggggcgggggcggcgcgaggcgtcgggatcctaggccgggtgatgagccgaggcgggttcggacgccgagcgcgcgcgctgggtggagatgtggggtccgcggggtccttgctttgtgtggtgtggggggtgcgcgaggtcaccggatggacgtctggggagctgcagggtgggggcgccctgcgccgcggctgagggtcttctgggggatgtgcggccagctgaggtcgggtgggggcatgggggcgcgaggggcgagtgtggcaagggatctgcttgcgccgaggcgcggagtctttgcggagcgtggggtggggacgtggggtgcattcgcggggcgccgggggcggaggtgagctttgtgagtgcgtccgaggtgggggacggggagctgacttccccatgcgtgacccgggcccggcgtggccatcgcttgggagtcagggccggcgaaggccgtgcgtggcgagatgggtgctcgggctctctgcggtgtccctacccgggcagcggccccggggcctgtgcgcaggccccgaggccgggcaggaagcggcccccgcgacctggggagctctgtagcggccaggcccgggaggcacgggcccttcggggatgacgtcacgggcgggggccccggacacgcgagccttgcgccccacagacggcggcgcagcccgccgcccttttcgaggccggccccccctctcacgcgccttgaaggcagggaacccgggaggaggacatgggggccgagtgcggcggggacaaggggtggcaggacgcgagggtgacatttggagcctggtcgcgccaggggcctccgtggtggggcggaggggaagcgaaacaccagccaggccctaggccgtcgcggccccagcttcctggggcgcccgttttcccggctagcagttttctttcttggggctcttggtcgttatccagtccacgcaggggccggagtgcgggctgccgcggtgctctcctgcgcggagcccgggctggcgggggcgcggcgggcctcgggctctgaatggatgggagcgagtgtaacaatgcgccggtgggggctgggggaggggaggccgcgcgcctgaatggcggagccggccgggcgctgctccgcgcgccgcacactctcccgcgccgccttccccgcggtttcggcgggcccggattcagggacccactcgggatctgcacggttcctcccaccaatactgtcccccgccccccttttatgtctttccaatgcagtagtgtgttgagaattcaagggcattacatctggttgcaatccagtttcatgccgctgccgggctgttaagacctcgcgctgacgtcagagcaggggaattacttctttttattttatctttttttagttgtctgctgccctgggaggagaggcgggggtgggttaggctagctctgatgtggaggcgccagcgtgatgggagccccgagctgggggctctgcttctcttcctgcccctgcccccctccattctccatacagtcctcgctctgctcagggtcaggcccaccccaggtggggggcagccctcgctgcagactgaatggtggcccctccctgctgaccacacagctgggttttcagaggctttcctgggacgtggccctcgggatctagaaactggaaaggaatcttctagtttcccacccctccccctcttgacaggcaagccggtatattcggggcccaggagcaaggaaaagtggccttttgcgtgacacagaagtggacacatcattctgatctcagggcaggctcagccccataactctggcaaaagctctcacaagcaaaagccttggagaggaggagaatgtatcaaggtgagatccaggccccagaagccaactgtggagtgggcaaaataggacctttcccaccagcctagcatccctctggcttctgtggagataaagggaactcaggggtactggagctgcctttctcttccactagactgtggggctctcataggcagggaccctgtcttactcctctttgttttatttttgagacagggtcttgctgtgtggcccaggctggagtgccttggcacaaacacagctcacttcagcctcaacctccagggctcaagcgatcctccagcatcagtctcctgagtagctgggatcacaggcgcccgacaccacacgtagctaattttaaatttttttttttttctagagacaggggtcttgccatggctggtcttgaagtcctgggctcaagcgatcctccctctttggcctcccaaagtgctgggattacaggagtgagtcactgcacccagccttactcctctttagactcccaagcctagaccaattgctttcaaattcttgcccgtgacctatagtaagaaatacatcgtaggtaactacacaggtcacactgtatatagctgaaacaaaagtttactgaaataactcccttactgtgtctgctggtctgtaatcctttttgttcttgtgtatttgttttttttttaattactgattgctacccacgaaattaattttgcaatccactgatgggtcatacccagaatttgaaaaaaacaagcctaggaaatgaatttgccatctattcatgcaacaaatgttaattgcaaccctaataattcctctcatgttaaactactcaagtaacacttggatacttgggtgaaaaatgcaaataagccagaaatatatgtagtaaaagtaaaagttcccttggcaccctccctgcaggtaaccccagttaatagtttgaacgtatccttccagactttttgttactcacttaatgcatatatatatatatatatatatatatatatatatatgtatgtatgtatgtatattacatataccaatccatgcatagttttctttttccccaagtgaggacatactgtgggctcttcctcggcagcttcctttttcctctccgtttgtcttggagaggttggttgtgtggcgaagtccttcagggcaagttctgggttgactcctggctccaccacatactgaacaggccatttacctctctgtgcctcagtgtccccatctttacaatcaggagaataacagtacagacctcacggtactgaagtaaagatgcagtgagttaatccatatgaagtttagagcagtgcttttgccaataaatgctgattgctgccgtcattgttgtattgttattgctgttctatctccatggcagcccatgtttgaaatgcattgctttccacagctgcctgtggccatggcatgggtgtctttttcctcccctatccaacgtgtggctccacagggagggaggaggtgcaacagcaacggtgtgcgcagagcagcgtctctgcgggagaggcacctgggcactgggcccaagggaacagggattttccaaggacccactgtttccaaagttctgtgcttaatgtcggggtccaagcaggaagcatccctgcacttgaccacaagaaggtcacagcccagtgggtgattgggacccagctcatagccaaggcctcgaccagagctggaggcttcctggaggaggggcctttgagcaggtgcttcaggcacggcgaggtaagagtgagaggagcattcctggcagagggaacacagtgagcagagcgagtctttggaagctggaagggatgtggcctgtgtgctgtagccaaacaagaggggaggacttggctcagaaagaatggtggcggaagaggttgggctgttgctgggacctcctcactggcctccctgcctccatcctgtcccctcccaggtgctggccagcagcactgtcagagcgatcgttctaaacccagcagataacctccagtggctcctgctgccttatgaataaaggtcccatctgtagttcttcccatgctgtccagggccatttctggtgtcctctgcctgccctgtcctcattcagtcctgtcccctccagccacagctggcacctccttgttaaggtgcagccatgtgcatccttgcctctgtgcatcgggctgggctgttccttccacctgggatgcccctcaccttcctccctgccgccccagaccaaaacagacgtcctgtctcctcctcctctgacctccgaggcagaatgagtcatctccctttgtctatactcgtggcatagcgtttatcacggaattatcggcaattctgccagtgtctgtcctccccatgaggctgaagcatcgaggcctgaaagcacgtctccttgctctctccggcccagtgccaagggcgaggcctagaacacaggacgctcagaaatgcttcctggcaggagggccaggtgaggtggagagggtgagagccccaacattgtctcccgtgggcccctttgatctttagcaagggcatgctcaggtctgtgtggatcttgtgctgtcagcctttagatgagtggggtgaggggcttggtggggtcggggggcagggggaggtggcgggcagcttccccaggctgcttcctgagggggctgggagaaactggctcatcctgttccccagtgattgaggcagagctgtgccctgttcctggtgggtcactggggatctgagattggaatgtgacaccagggaaggggaggcagggtgggaggcagggcttggaggtacaggctggggcttggctggcaaaggacagatttcgctccactggttcttgaacccgtgtgtgtgtgtgtgtgtgtgtgtgtgtgtgtgtgtgtgtgcacgcgcgcgccggggaggggagagatggggaagagaaaaacatgagggcagagaggtggagtgggggtggaggacctggggagtggtgagcagggacagggagagatggaagtggggggacggcaaggagtgagggagaagttcctgctgctgctgctggagagtatgaagagtgtgcttagggccaggaaggaaagcagccaggcgcatcgtctcacaccaccatcagccatgccttccttcgtctgtccagcagacaaccctaagtgttctcttgcttggctccatgcttgcatggccccagacaggagcaagcctgtggtccaggcttcgcacccttgaagtctaggggccaggtgaacaatgagcatccggtttctttcttttttttgagatggagtcttgctctgtcgcccaggctggagtgcaatggtgcgatctcagctcactgcaacctctgcctcccgggttcaagcaattctctggctcagcctcccaagtagctgggattacaggcgcccaccaccacgcccggctagttgagcaacctctttctgcacaaagtgatcaggctgggggagagaaggtgcccagaatgctgtgcagaggcaggagaggagggtggagcaggcgagcatggggtagggggcagggaagccatgtgttaggcactatggtggggagccaggactgctggggagtcttcctttcctctctggcctcggtctcatctgtaaatgggggaagagtggactgctcttgcactgatggtctgtggacccaagtcacccactccttgggcatgagaaaccagggaccccgtggagacagctgatagaacagggacagcaggcatgctcagagcgtctgcaggcccatggtcagggggcttgagggagaacatgcagaatccagtggagcttgggttcgcctcctagagttcccttcttggagactgtgctcatctggaaggcgagatagggtcggggtaggggaaggagcactggattcggaatcaggaaaagtggttgagttttaactgcagcatccctcgggcaagtcactttccctctgtgagggtcagtttcctcttctgtcaaaaatgtgaacgggctttgttgtaagcattaaaggtgagctggggcgccgtggctcacgcttgtaatcccagcactttgggaggccgaggcaggcggatcacttgaggtcaggagtttgagactagcctgaccaacatggcaaaaccccatctccactaaaaatacaaaaattagccaggtgtggtggcccatgcctgtaattccagctacttgggaggctgaggcacgagaatcacttgaacccaggaaatggaggttgcagcgagccaagatagcaccactgcactccagcctgggtgaaggagactctgtctcaaaaaaaaaaaaaaaaaaaaagtgagtgttgctgtgttttgtcatctggaaagcaaggaggtcctatagcttggggccataaacaggctttggggtcacaccagcctgggttcaaatccaggtaccagctgctcactgtggggctccatttccctcccctttaaaatgaggataataggcagggcgcggtggcttacgtctataatcccagcactttgggaggccaaggcgggtggatcacttgaggtcaggagttcgagaccagcctggccaacatgatgaaacccatctctactaaaaatacaaaaattagtcaggcgtagtgtcacatgcctgtaatcccagctacttgggaggctgaggcaggaggatcacttgaaccccggggggtggaagttggaatgagccaagatcgtgcctctgcactccagcctgggtgacagagcaagattcagtctcaatgataaataaataaacaaaatgaggatagtaacaggcccctcctggttgctgctgcacagttcctcagctgggatatcattgctgggctgttaggcagttgttttttgttttgtttgtttgttttttgagatggagtctcgctctgtcgcccaggctggagttcagtggtgcgatcccggctcactgcaacctttgtctcctgagttcaagtgattgattctcctgcctcagcctcccgagtagctgggactacaggtgtgcgccaccatgcctggctaatgtttgtatttttagtagagacggggtttcaccatgctggtcaggctggtctcaaactcctgacctcatgatccgcctgcctcggcctcccaaagtgctgggattacaggcgtgagtcactgcgcccagccttgggcagttatttttattgctaaagtgctttgtatgtagaagagatcaccattatgattattattttttttttttgagccggagtgttgctctgtcgcccagactggagtgcagtggctcgacctcggctcactgcaacctctgccccctgggttcaagcatttctcctgcctcagcctccctagtagctgggattacaggtacgcactaccatgtctggctaatttttttttatttttagtagagatggtgtttcaccatgttggccaggcgggtctcaaactgctgacctcaggtgatccacccgcctcagcctcccaaagtgcagggattataggcgtgaggtgagccaccacgcccggccaattattcttcttccattcatgccaggtcacatctaacccttacctgtaataacattggccaaaatgaggagtttggtgcttatttcttttctagccaggtcaaggcagatggattgagtgggtctttttacacatggggcgggtgagaattactagttttctggccagagtttctgtatgtaaagggactttgccccagtggtgtaggtggaccccaggaaagcatccagcaacttgtgactttagtggcagtataaccacaaactctcattcattcgttcatttataaatcacgtgtagaacaccagggtactgagaaaacagccatgaatgagatgcagctctaatgtagcatagtgggtatgcatatgtattttggactttgcctgggttcagatccagggtctaccacttgcgaacttagccaagttatttatctcctttacttggttctgtcatctgtaaaatgggggaactgatagaatctacctcatagggtggtcgtttgttcaagtccagcatcaggtacatagaaagtgccagagcatggcccttcctccattgttgcttttatttctgccctgaaggatctcatggaccagcttggtgctggaggaggtcaccctggccaggcttctcagtgacggttggcatccagaaaggggtgccaaagccccccaactccttgaatcagacccttctatagtgatctaaagctgcttctctgcttgactgttggggcctgatgctggggaggtcctgtgaggccttattgacctgggaaagtccgcctttgtctggcgccaggtgtgcttgattttagaaggaatttcattcctagccgggcaccgtggctcacgcctgcaatcccagcattttgggaggccgaggtgagtggatcacctgagcccgggagttcgagaccagcctggccaaacatggtgaaaccccatctctactaaaaatacaaaaagatagctgggcgtggtggtgggcgcctgtaatcccagctactcaggaggctgaggcaggagaattgcctgaacctgggaggcagaggtggcagtgagccaagatgatcgtaccactgtactccagcctgggtgacagagcgagaccttgtctcaaaaaaaaaaaaaaaaggaatttcagtctcaagtatgaaagcagaaagtgtttcctgattgaggactcctcaccagccggaggcagcaggactgcctgcctctgtgtgtctttaggcaggttcctcaagctccctaagcccgtttcctccttcatcaaaggcgaaagtaatagtacctatttcatagttttgttaagaggatcaaatgagatagggcctctaaagcacttagccagtcctgggcacagaatagtgtgcttagtaaatattgtgcctattagtgataatcagaattctcagacaatgtaaagtaaaaaccacctgaaagatttcttaggagctacagcttcatagagatgtgaagttgtaaacctcccagagcccaagtggacaaagaattgttacagcagctggagagacaggagacccagagaagcttaactcctgtagcaaagtcacccagcattctggcttggggtgggcagggatggggaatcagagctggctttcagtctggtgctctctggtgctttgatagtgattccttcagcaaatagctatgggcaaacagcattgatgcacagctgaggtcatatgggcctgtcttctggaagcttctgttctgatagggaaaatgaaatttctacatgatcatgatgagaggtaaaataaaatcacatgttctattagaagggtaaagtcatcgggtattcactcattcaagggggctctgtgccaggctgtggagcagtgggtctcattcgggggcgatcttgtgtctcaggggacactgggccatgtcaggagacatttttggttgtctcagctggggaggtgctgctggcatctagtgggtaaaggccatggatgctgctaaacatcctaccgcacaaggcagcccccggaaccacacaccagctggcccctgatgtccatgtgccgagggttgagatccctgtcttgggaagcagcagtggccaagcagatggagcccctgcccgtttgaagcatagagcgtggtaggtgagcagacgttacagaaatgattgcctagatatggatttatttgtaatgtgagctatgaaggaaaaggtagcgggaagaaagagggatgcgagcccttctactcttttaagggagggcctttggggaggtctttccagctgagggcacagcccaggcaaaggctcagaggcagaaagtgcaggagtgtgttgtgggtggggaggctaccaggcacctggtgtgtgcccggggagaagtcagaaaaaggcctggcctcggggggcccaggaagtggcttccagaggtggggagaaggcaaaagagaggactaaaccctttagtctgtttgagggaactccagcccccagcatgttgctctctgggggatccagcagggccaggtgggcagtgggagcaccctagccccaggtgctaccttccagcctggggccaagccttttccctttctctcatttgcagctttctgataggtgggaaagagaagcaggaaaaaagagcagaggaaaaacaatattttcatttcaaacacagataggggtgagggaggcgggaagtaatctggtttatgatacctttgagacaagcacagaaaatccccaccgtggcccgaaatagcactaaaacagacgttttgccaaatcagacttaattgagtggctctcttcttgactccagcaggatgtggctggagctggctttgttcccttggggtgacactgtcccctggggcccctgccctggctaattaaacaaagaggacctggtctcctaggcaggacaggagcctggggagctgaacttgacagcccttggcctctgcctgagagggccagaaatggttacaggggttgggaaggtggggggttcctgacaggagggccaactgagtgaaagcattggtgggagaggcctggttcctctaatatgtgaatatctgtctctttggatgctgaaagggatggagaaaagccagcattgagtgcctactattgtgccaggcattgggtggtcctcgctaagtcttattaactgccctatatccattatcaaggaaactgaagcacagagaggttaagtgatctgcctgaggtcacacagcaaccaagtggcagagctaggattagaaatcacatccgcaggctccaaagccaggccctgcctgctgcttacccccttccccatgttagtcactcatccattcgggagctaattcctggctatgaaataatattgtgaccttgtgggaagtgaaggcttgcagtcagacagccatgagcttggcttctgaccaaagcagtttttcttttcatggttttctccctcagaacctcctctttcctcatctatcaagtgggcataatcatgcctttatcctggagttgctgtaagggttaaattcagcacagaaagggatggaaggggaaggaggaggtccttgggccacccagcttggcagggtgcaataaaagagtcctaggtagagggagccaggcaagattgcaatatctctgtgcctatcagtgttgggtttctttatttgaaaggggagagagggcagactccactctgcaggtagagaaggtggtgtggaatgcgggtatttatttttctttgcctgtgaaagccctgttttcgctcaggctgtgtagggcttcccgacactgccatgggtgcgcacatctgcacactctggggtgcctgccatgcagaggcatctgcccagggtgggcactgagggcatccaccatgtgacgcccccgtgcagcctgtaagctctcatcacagtgcctgggatacctgggagtccccagaaagagtgaggatgggtgagggccatgaaaccagggcatcattcctccacctcctctgatcaggccctcctggtcccattcatctccttatctcctggcagccagtgggttgctgggaaggcaggggcagccttcctgattgacaaacaaaacaagcttgatcacaaaaggagaggggagactggctgggcctctccagctcccctccccgtgccccaggcatctttcttgctccacccaactggcaccctacattctaagatgctgcgagggggctccaaagccattgtcgaaggtcaggccacccaggctaggagccccttgcactggggaggtggattcaaggagtgatggggttgccatgaggcggcgcttgctgcaatggccgcccctccttcccttcagctggctgggcaggcagcttggagaggaagccaggcggcaggtagctgagaaagacatcggatccagggggagcagcagagaaagcaaacaaacagggctttgtgtggctgcagattggcggctcagaagggaagccaggcctgtggtagggggaagggagaggaaggaacgggagaccaggccattgctctgggccagagatcggcggctggaccagcccgggctgggcggccgggaagtagcgagtgccactacgtgtggacaggcatctggagtcacagcctggccgagtcccagctctgccacttcactccttaacagatctgggcttgtttgcccacctaatctgggcagtcattcacacgtaggactcgctggcttaggaggagagtcacctgtcctggcccagtcagtgtctgctctcatcctacccttgtcccgtcattgctggcaggacacagaatcaaagggattcagggtctcctgggagctgctagccttgccgggtctcctgggagggcagcgacttctgcttagatctgtgggcactttggagtctttgaccggggaggcagccgtgctgaggggaaacgggttctctgcccaataacggatgcctggggtgtaggtgggcagaggctggcatcaggcctgaggaaccaaactgccccctcctcgtcgcggtggagacgcacgaggtgcggggaggaacatagccaggaagacgggccttcctgtggggagggaggggcatcttttctggggtgtgagtcacattctggatcccagcgagggcagcccccaacctggcccacctctcagagggctgggagggcccgggcctcgaggaaaggcataggtaggagctgtcaggccagacgcccgggcagctccacgctcgcctccgaggccatttcctttcctctctccccgacctcgagaaggggcggcgagagggcaaatgcccgcgcttcctgccggtcccgcccctccccgcccgcggcgcccaccatcttggccgcgccggagcctcctccgcggtggcgtcccacaggccgcggtcggggcccgcgacgccgacgccgggagggggcccgggaccttcggggcgctgaggccaggcggggggcgaggcggggcgggccgctcgcgtcgccatggcagcgcccggcccggcatgcttcgcggggccgcggggcggggcggggtgctgaggccccgccccctggcggatcccgggtctttttccgggaacgcgggggcttccagtcccagcgttgcggccggcgcttgcgggttaccgggccaggcggcgcgcatctctgggcctcgttctcccactccctggatgtttggggataatgaaagagagtctgtgcgggttagcctcgggacgggctctgcttaccgagcccggcaaccccacggcaggggcctcgggaagccgcttccgagggccaggataatggggagactggacccctaccgcttgggggctattaaaagtggaggccaggcggcctctcagctgcagtctctgggtctcgagctcttccccggaactgtccatgggtcagtgaggacctaccctttgccctagggcaggagaaagaagggggccgggactgcacacctcacccggtccaggcctggaccctgcaacctcggccggcctccctccagcccaggagcacaggcctcccctagttggcagtcgttggactgtctggctgggaggcacattcctacctcctgagctcgggcaccccgcctgccctgggggagcctcttccagaactttgctgccaacactgccctgtccccacccggccttctcgtgccctaagtccctagttactactccacagccgccttctttcccctggtctttctctctctctttttttttttttgagctagagtctccctttgtcgcccaggctgtagtgcagtggcgtaatctccgctcactgcaacctccggttcccaagttcaagcgattctcctgcctcagcctcccgagtagctgagattacaggcacttaccacggctaatttttttgtatttttagtagagacgaggtttcacctcgttggccaggctggttccaaactcctgacctcaagtaatcctcccaccttcgcctccctaagtactgggattgcaggtgtgagccactatgcccggcctcccctagtctcttaagaggcaccgattcagctaccctttgtcacctcctacctgtactgagtaggcagctaaattgaatgtcggcctttgggtctccgaagggaggctgtatgctggttgagaggctgtcctcgcgcctttctccctcctcacccagggcacatgcacaaagaggctgagaatcggctacagttgcagcagaagagactcagggttgccatcggaaagaacttcccagtcctaagcattttgttcttagtgaaattgtcagattattgatatgttggttgtagagatatccaaaaatacaagaaaaaagtaaaaactttataattccaccagcagtatataactactgtcaacatactttctgtagatgtatgataaaccacttatgatacatctacggagtcatgctgtatatttggttttgtaaggcacttggtggttttaatagcttttttctcactataaaaggaggacaggcttattatagacttttggaaaatatgacaaattaaaaaaaaattcacccgtactctcagtctccaaaggcagccacagttgtcttccctcaacccccccaccacccgttcatggggtttttcgctttgtgttttttgtctgtttaggtatgccatcattacttctgtatatagcagttgatattccgcttttcttacttaatgctgtttaagatgctcctgaaccacgttcttgggagaacttccgagatgaggcagacatttctgggggtgatttgttggactggctgttcactttctgagtttgtcctctccctacctgtagccccccgacagagcccttctccattgccagtaaccaatgatatgcagcttgggtcagggggtcctgcttgctgggggcccaggaggctgcctagtgtggacagggacatgcaagactcatggcccgatgctgagatctgggctccaatagtaaggggctttactctggcccagatatgccaggtttcagggaggtctcagaccttggcctcatcctcattcggggcctcctttgcctgggcacactcagacccgaggccccttgtcgatcctgtgacccaccttctgctttgacttcctaggagttggtttctgctgcccttggctcctcagcccctcttctctagcctctctctggaggcatgcaggcttggcaccagcacagcctccctctgcccagctgccccttggccctagctacaagctgcccttgccctgacctatccctactgccaggcctgtctcttctcccctattccagaacggttcaattctaacacatccaagccctgcgtgaaacaggccttgggaaatcacagttgccagggacggtttggcatttaaaaggcatccaaggctttggggaaaaagctgaagagacaagaggatgcagggccctgtatcagaacagcatctggatttactggatggaaaaatcacagaatgcccctttcctcgggaataacagtcctggccgaggggcagcgggtgtggcatgggcacgccatgccctgcctggccaccacctgccatcaccgctgtgtactctcagaaatgaaaagattagggaaaagattagggagggacattgtcagcctgcagccaacggcccgctctaacaggtttattcagttgtaaaatatttaagacctgtttcactttacctgtatccaggaggcagccaggctggggccgagattgatgtgctgaacatgatttatttatctggatttgctcttgtggtctgggtgttacctgggtgtggaatttaaccaaatgacaagatgggtttgcgtgtgttcctgagcttggggattgtgtgtgtgtaaaaagtgagttggggtttgtgtacatggcagggggttgctgttaggtggcttgtgtgtctgtttgtcactgggaccaacgtgtggttgtgtgtgtgtctgatttggggaaatgagctgagggtatgggtgcttacacaccaggcagtatccacagcaggtcacacgttctttgtgtgttgggggcacctctgtgtgtggccgagtagctgtttgtgtgcatgtcctgtggtgtgagacctggatctctctcacccacttttcatcagtggtggggcattgcgcactgactgagttgctggggcatctgcttttccatccggccctgggtgagcactgacaacacctgactgtcttccagtagaactgggccttcctgccctgcagtccagagactagagggagttcggtggtcaaggtggtccaggcccacagccatagccctaatgcaaagcatggctcctactccagtgcgctgctgtggggtgaccctgctcctcctccctggacctcagtttcctcttctgctgcagagggcaggcgcccaggtccctgtggctgctctcacacacgggcttctgggtggctcatggcaggcttagggcattgggctggggtttgtctcctgccactcaagagttgagtcccaccagtactcaagaacagcaaggaatgatgggaaaatccctgctttggggcccaactctggattctgggcgttgtctctgtcccccatctaggcccagccctggcccagtagtcaggaaagcggcagacaaccctgtaacagccctcggtctccccctccccccacacccctttatattgaatgtgtctgtcactactttcctaatgaggctgctgagggcccccctggggcagatacctttgcagaccggaggtgagggggtgggccagcctcagggtcaggacaggaaggggagctgagcccttcccctgcctgcacccccaggccagctcagctgtggaggcattgaggcccctctcagcccctgagccagctgtgagtgggcatgagagcttggggaggtaggaaagctcaccccaggcactgagttttctttggcgctgtgactctgtagtaataatacttccacctggtcgatatctatgtttggaggcctactgtgtgccaggcactgagatcagccatgatctggatggacacacaaaatccctgcccttgagggaggtgtggccaaaggaagaaagacattaatcaaagaatcaagtgatctgagtcgtgcattcatgcatgggaatgccggctgatcacaagccaagacagaggccaggcagagcttctctgatggagacagggagtcctgtgcttagactgggggctgatccaggcactgggtaaaggctcagccgggattgaaggaatcaggagacccagattcttgctgtgtggcctcaggcaactgcccaccttctctgggctcctagaggctggtggcttccttctggctcccgtcacctctgagtggaactcaggcagtatatgtctcctcttcagtgctttttgcgctccctgccagggccctcaagacatctgtcggcaacatccttgactttggaatgctggaggcactgccccaggggacgcctggagccaagcacagcaccgctgcctcaggccccacctgccagttcctctgggcccttttgctctcacagagccacctggatcgaagaaagcctggaaaacattaaattgaagaattagtcccctattttgccccaaaattgcagagaaaagcatttattcatgcattcactcattcatttgcttgactagtgtttcctgaacacctagtaattgctgggcacactgcactccatgttggactgagatggcaaagtggtggtcctcctgccacgtcctgaccacagacctgttttgaaagcccatccattgtcggggggccgggggggggggaatcaaatgaattgccagtgagtaatcgttgagtgacttcatttccaatttccagtttacatttcttctggattattctaccctgcttcccccggccacagttggtggagatggctactgtctgccgggtaggatggcccacccagcccaccagctggtcacggtcccatcccccaccactccaccccaccctgtgcctctcctggtcatgtcacacatgatagtgtggcttcctagttatgagcccagcctcaggagccagactgtcgaggttcaaagctcactgtggcttgtgggaccttgggtgtccccctccaagcctcagattcctcttgtgtaaaatgggatcacaagagcaagtatccactactcctggggctcttggggagattaagtgagaaaatttatgctaaatccttaaaactcacataagccttggctgctatcgttgttgaataaatgaaccacttgcaggctgagaccggggctgtgtgtcacatggcacctctaggcctcagtttcctcagctgcttctttgggaaagcacatctgctctctaggttgggcctcctccctcgtccttcaaagacctattcttggggcctgggccctgtgaaacctctggctctcggacgcagcctggaacccctgagacgaggtcaagctccgcggcccgcctcctgtcgcccggccccaggcgggactgccttggcaggactcgggccgcgagctggaggcgcggctcccggctcggggctccagcggccgcgccccgccgcccctcggcgttcgcgcgcagcccctgcgggggtggccgccatcaaagcgtcttctcgttcttatgctaatgagccccattaaagcttaatggctgcgaacgcgcgggtttaattgcacctgcccgggcctgaggcgcggccggccgcggaagcagctgcgcgccggccgggacggccttaattacctggaaaacgacgcccggcggggaggggaggggatgggagagaagaggagagcagcggggcctccgcgaggccgggcctcgtccgccgaggccgcagtccggcccctctcgtcctcggggcgcggcgcgttcgtttcattaatttatcgccctgcctcggcggagatccgctcgcccgctccccggcgttcaaccgcgccggcttcgtgctcccccgcgccgtcccccggccatcttgggcttggcattcaaggcccttcgggaccgctgctgccactgacccagtgccaccctgctctgcacgaacaataataatggtggttgcacattacgtgccaggcgctcttgagggttgaatgtgacctcgcagagaccccagatgcctcatctcggccttactcccctcgtctttagaagctggtacctctgcctgcaacaaagacccctctccctcctcgctcatcctccctgaaacccacccctgcgcctccaacaagatgagcccctgtcctcctgggatgggattggggatgggtctgggccctttgttgaggggtgggctagcccatggtgaaggttgtctgggtgtgtcctccctctggactgacatttcactgaggccagtctgcctgactgccctatctctgcatgcccctgccatctccctggggatggccctggggttgtgggggctgcactgctgccctgagccttctgcctaggcagggggctgtgagactgatgggaacctcagggaaaccttgagacctaatggtattctctgtgggacttccctgtgctcctccccaccccatcaagtgatcctgggataggcgcctgcccctcctctctccctcattcccttctctcactcttctctttttgcagagggaaggaaaacggaagagggaatagacagaccgctcatgcagtttttagatggtcccctttccctcccctctctcttccatgtccccttgtacccagcccctcttttttctttctttgaagaccgcatcttgctttgttgcccaggctggagtgcagtggtgcgatcatggctcactgtagccctcaacccgtgggctcaaacaaccctcccacctcagcctcccaagtagctgagactacaaggtgtgcaccaccatgcctggttgcccctcctttctgccccttccagtcccatccctcctccctttgtgcgtctcagagaccaaagcctgaagcattgcacagtgcccactgggaggccacccagccctggtcctgcctgtgtcaggcaatgctgagagcacagaggggagtcagacttgggctctgccctccaaggactccagtcggggaggcagcgctcgaaaggaatacttgtcctctaatggaaaaaggaccaatttaaaggaagcagagaacagtctttgagctcaaactgggaaggctgggagaggcttctaagctcagcctggaaggaaggataagtgtgagctaattggcaggaatagcattccaggtagggaaacaattggagttcagccctggctagggcagaacactggctgacatgaggggagagggagtaagggacaaccacagaaaaactgagctcactccaaagtgtggaggcatgaggctggagaggtgggcagagggtcctctgttgcctagcaaccttcactgcctccctattgccaagaggaccaaattcagacccttcagttggcacaaaagcttgtaccacccacctcatcccaggatgcagcctattatcttcagctgggttcctcactaccaggccaagcctcggatgatgattgtgagcctactgtatatgggaaggggggataagcagtgaccccatcagggctaatagcagtggggcctgctgcccaactccatgccccttctcccattcttgtccccagatgtccttgcagacaaaatggaggtgaatgggcaggctgccaggagcgtcaggtggcatcacagccgggtagacagtcgtcactgattaatgaggtggtagaaacctagagggaggtccctactggcatgcctcggggttctgcccttgctctggtcaaggcaaggaatgaggctcacaggggtttagcacctccctgccaggctatgtgaaactcttggtatccagtagtttatcaccagccatgaggtggcttctcttaatatctcattttgcagatgcagacactgaggccagtcggggtgaggagtgagctcaaagtcactcatctccgaggtggcaaaattaagcctcaaacccagggctgtgtgacttcaaagcctgtgtttgtaactgcggagctgtgcggcatcagtaatgcatctgctgctgctgccagacgtgaggaggtggggccctgcctttcaacttcatctctctgacagtggttagcactgtactttacgtgtagtaagtgctcaataaatgcttgtggactggatgattggggcagtaagcagtgagcagggctcagaagcagtggagaggctccatcactcttcctcccaacctgcacctccacccccaggagttggacagcggctgtaaggggacttggagactcaaggcttccaggcagggagtgggctcacaggaggctagggaggatccaacttcctgtccaggtcagggtcaggaggacagccgcgccccctactgccccgctgggaggccaggctgacgtaggaaggctgcactgcaagtcagaatcatcagcaaaacctggggaatagagcgtgtgagggtttccatgcagggtggggactgctttctgatcaagcccctaggccaaaaacctttggaagggactctctgagggcagtgcattcttgtagcgtcgggagcaggagttctcccataacctttttggggtggggacccacctgtggctctggaaaggtgttggctccggctctggggctcagggggagggggccattggtgggcaaaacaagcatagtgaaaactgaggctcatagaggttaaggtcacagagcagagctgggtctgttttctttttgtttctgttttagttgcaacaggggcttgctctgtttgccgaggctggagtgcagtggtatgatcataaatcactgtagcctcgatctcctgagctcaaacgatccttccgccttggcctcccaaagtgctaagattacaggcatgagccttcatgcctagctgggactgttttcaaactccaccaaccccttttcttttgttccattccactctgcccagaaccttcgtctggcttcccagagggcccaagtccttgtcttcagaggtcctggctggggagccttagagcatggtcttccctcactccaggcttctcgggtctccctattggggactgaccgtgggagcagtgagccactgtgcaccagggcagcccggctcctcggggggtggcccaagcagtcagggcggcaggcttgatgggccagggcctggggactctgccatggtggaccattgtgcccttgcctggcttgccaggaaagtggagtgcgtgtgctcacccttgcttctgaggggccttcctgaggcagaggctgtccctggacacccagtgctgttgaggcagctggggacactcagaccatggtggacaaagacttgaagtctcgtttcagccctgcacaaggtgtgaccttggctccagcactgctccctctgggcctgtctctttctcagcagaatctgggactggccacatcatctccaggggttctagcattggacgcctgaaagtggacaacatggcagtgtgagggggctctttgtggtggggtggtcagaatggccctccatgtggggggctctttgtctccccagggcagtccttaaccaccagccagcctccccaggcacccgtgccgggcagtggggtgtgtaaaggcctggcacacacagacaggagttccgatctcaactccatcctcatgagctctgtgaccttggtgagtcccttttctgtgtagcctttaactctcatctggaacgcaggatatgcatagtcctgacatcaggacgttaccatgagtagtaagtgaaactcccacttcaggtccttcgcctggtgtccagggcatgggaggagctaatacgtggcctctgctgcttgtgttgttattggtggtggtgtttgagatgtccttagagatgttggccaaagtttccagttccccaccctcccaagcccgtggggaaattgtgcttcctggtggtttttgggtgggggggccgggggagggtcatgtgaccagttatggcccgtgaggtgtgagcagaagtgacatgtcccttctaggccagagcctttcatggccatgaggatccacagaactcactttcctctggtagaccaaagtcaaggtggcaactgctcagtgagagggagcctccctgctaccccagtggatggtagtgtgaaggataaaccaacttttgttgttgtgagcccttgagatttgagagttttgttacagcaacatggctagcacatcctgactgattcttcatcatcatcatcatcatcactcaagcctgtcccccggccaggggtccatccaggagaacaacagccatggaggagacccgtcaaaaaatagaactttattaccaatctgtttctataattgtttgactcattttctcactcatttgtttgctttatcaccaatttctttacatcatttattccttcaaaaacatttcttggctgggtgcagtgggtcacgcctgtaatccgagcactctgggagcccaaggcaggcagatcacctgaggtcaggagtttgagaccagcctggccatcatatagtgaaaccccatctctactaaaaaatacaaaaattcggtgagctgagatcgtgccattgcactccagcctgggcaacaagaacgaaactccgtctcaaaaaacaaaaacaaaaacaaaaacaaaaacgagccaggtgtggtagcacacacttgcagtcccagctacttgcaaggctgaggcaggagaatcgcttatacccagcgggcagaggttgcagtgagctgagatcgcaccactctactctggcctgggcgacagtgcaagactccctctctcaaaaaacaaacaaaaaggctgggcacggtggctcacgcctgtaatcccagcactttgagaggccgaggtgggcagatcacgaggtcaagagatggagaccatcctggccaacatggtgaaaccccctctctactaaaaatacaaaaattagctgggcatggtggcgcgtgcctgtagtcccagctactcgggaggctgaggcaggagaatctcctgaatccgggaggcagaagttgcagtgagttgagatcgcaccactgcactccagcctggcaacagagcgagactctgtctcaaaaaaaaaaaaaaaaaaaaaaaaaggcaacaaaaaccaaacgccacttgaccacctgtttcataggccctgaggtagcgcacaggccagcagggagctatggatcattctgcagagccacggtgcttgcccagaggtcagcagccctatgggatgcttggggtggggcgtcagatttgcagagctggggcgagggaaggaatggcacttgggggagtgggtctgctggagaaaggcctacaggtaacaggaagcactaggcagttgggtccggccagcagggatgggaccgtgtagtggccaagctggagggggactttggtccctgggtcatggggtgtgcagtgctctgcactgaatgatgagagggcatgcataggtgaaacaagaggccagctgctgaagggaggaagaccaggtaggcagctgggccaaggatccaggtggacaagggctggcatgggtctgaagaggaagagcagggccagggaaagcccagggctggatggccagtggttgtgagctgcaccagcagccagagggagccggggactggatgggggtggccctgtgcagtgacggggaaagtttgagggatcagagtagagttggggcacccgagcggcatccaggggagatgtccaggatgtagggtggtgaatggacaggacattgaagtgagaatcacccctcctgcccatagacaaaccattggtttgagggtggggcctgccctgggagccgggaagcacacatttcttctctgtgtgggctcaggggaaaaaaagaattgaaactcccacaggggaaaagtttttaaagattccaccattggaatgctggtcttgtgtaacaggaatgttttaatccatgcatttgaaacacagttattgagatcctactgtgagctgggctctgccctaggtgcccatgggtgagcagacagacagcgatctctgccctggtgagctccttcctgtcttagtgggagacaggcagctaatgacgagcaatctggggcatgctccttagtcctaagctactcaggaggctgaggcaggcagatcgcttgagttcaggagttcgaggccagcctgggctacatagcagaaccccgcctctacaaaaaatacataaattagctgggcatggtggtgtgtacctgtattctcagctactcaggaggctgaggtgggaagatcgcttgagccccggagtttgaatccagcctgggtaacatagcaagaccttgtctctgaaaataactaaatacttttaaaaagaagatagatgtagtgagaaaaaaaagtaggtggggaaggggctcagggatgggggagatgcgtgcagttttaaattggagtgccaggaaaggcctccctgagaaggtgacaggtgagcaaagactcgagggaggtcagtgaaccttgcaatgtcaaagggaagggcattgcaggcagagggaatagcagtgcaaaggtcctgaggcaggaacgtgtttccatgttgcaagaacagcaggggagccactgtggctggaggggactgagagaggggagagggttcctggaagactgtttgtttatttgagacagggtctcactctgtcacccaggttggagtgcagtggcatgatctcagctcactgcaacctccacctcccaggctctagtggtcctcccacctcagcctcctgagtagctgggaccacagatgcgtgccaccatgccctactaattttttgtatttttggtagagacgggtttttgccatgttgcccaggctggtctcaaactcctaagctcaggcaatccacctgcctcagcttcccaaagtgctgggatcataggtgtgagccaccgtgcaggccagactctagctttcattctgagtgagctggagactgcaagaggcaggctccaagctgacttactatctcacaggctccctcaggagttgagggggccagacagagcttgaaggggagtagaaggctcctggaggctctggcagacctcagaagctgcagccacatcgaccaagctgaccccacccaccatctccaaggaatgggttaatgggcaccccaggcctctcaggtctctgcctctgccttgctcctcctccttcctcctgctgccaccctctgatggtgcttcagcctgtgccatttttctgggtcctctccaagtgtatattgaccctgaggtggcagcaggaggggaggcaggccccctccccaggaggagacccccttgatgaactctgagaagctggttgcttagcaagcccttttttctccaacaatacttgtgctaatcagcctagattgaatgagcaaggaattggcttttgcaccttcctgtcctctcttctcatatatatatatacacacacacacacacatatatatatatgtacatttttttcccttagagacagagtctcactatgttgcccaatctggattcaaagtcctaggctcaagcaatcctcctaccttagcttcctgagtagctggaactacaggtgtgtgctagagtgcctggctagggactccattctagaatcatggaatcttaggggtcccctgggttgcatcttgactcagtgagtgagtgggttactttttcacatccctccttgtacacctcctgtgactcctggcagctcactctctttctagcgactgagggcctctggacaaggtgagggggacagagcaatggtccagaagttagaagactgtggtcccagtcacaggctgggcaccataagtggacaccataactgacccatcctccttttgtgctcaaatgctgcagttcatccggaaacaaccaaaacattccagcttcacagctgccagggtttggagttgaaccctgtgtcccgtgctcctgccacccctgctccaggcacaaagggaacagttcgtcagtccaccacgggcctttcctatcctcagttgcagagtgggccaggacatgccgctttacagatgggaagactgaggcccagagagtggaagggaaggagaggagcccattccaggctcccggcctgggatttttcccatatgctccagcagccacccggggaccatcattatgacaatgatgactgatggagggcctagtgtgccgggcactgtgctgagagaccccaaggagggcgtagcatctgtgtccacaggaggaggctgtgaggctgagagtacctagggagagcagagctggagctggctgggctctggccatgcggctttgctgtttgctgtctgctgtttgccgtatcaaggggcgatactcaggcgggctcctctcagtctctcttctttggtctcacctctactcagaaaagccctttgctggcccccaaatactcctaccccgactctcttctccacccctccaggctcccaaggcccctgcctgcctcggcctccctgctgggttgaccacagtcagtcctggctggaagctgaccctctccacagctgccccaaaatacatgtcacagtggggcatttgcagttccagcctgggcagctgcccactaggtctctttccttcccttccctgggtctgcccccaggcccctggcctcattctggtcctgagctcccttctctgggccaaggagctgctgggcctcggggagggggaaccccagcactaggtccaaagtgatgtagcagggccactgtctgtgccggggcctggagctttcctctgaaccttaaggggcccccagatcagctccgtgcgggcctggggtgcagcttccagaatcttggaaacctgtttttcatggagccagatagaatgagcacccaggaggaggcagttccaagagctggtgcttcaggaggaaacctgcacagcagacaggcgtgcgcacattcctagatgctagccctgtggcggcgcacctcacgctcattcacagtacacggacatgctcacctgcccaccatgggtggtcaacccttggacacccacactcttctcacaccctcacacacacactctgcaccactcgcctagccccggccacgctcatgtcaggattctgaagacctcgagcacacacagacacgcacctggtcacgtgcactttcacacatacacttggcaccagggtggcagcagcggaggtgactgagaagcctgcttttcacagagaatcagaacccagcgggggctttagccacaaaaaaagagcatttcaaggagaagggctgcctgcatgccaagcacacgcccctcacctacccaggaccccttgtgggagctgagccccatggagaccccggggtacccatcccaccctccaacatccatccctacgtggatatacggccacagttgcagctgcggccatgaggaggggtttttgctcctttttagcagtgctccatcccccaccccagagtacagggggctgcccagagaccctcctggccctgggggcctgtgagtcagaggctgccagtggtggcctttcggctgttgctggggaaatggcagcacagtggccaccaagactaggactccctggggaggccctgctggccctggcactggtggcttggcctcacccagccccacctggcagatgtgccccttgtggctacccaaggactggccccctcctcatttcagaggtggagaaactgaggtaaaaaagtggagacagccagggcacccctcccacaaggccctgcctcatttgagacagagccctctgggaagcctgtgcattctgtaggtggggacctttggggccattttttccagaggcccagagagggccgtcttcttgcccaaggtcacacagcaagttcatggcataagctagccagcctcgtactccagagctctcctgagggcccccatgtgtctgtgcgggggtgttgatggggggcaggtgggagggaggaggtaaggctgatttgtttcccagcctcctccccctcccctgctcccttctctccctcacacggtttgtttggagaatgactcacaggaatgcagcaaaatcctgatggatgggaaggcagggccgcagtacccggaaaacctctccagggtagggaggcggggctgagccttggggcctgagaggctggtgataggggagccctgcatgcaggtggggcgactgaggccctggaagaactctggtcacgtcctggctgggggttgtccctcctcgacagaaacacacaggccctggctgccgcagcacccctggagcacccgtcccccatgatttccatctttgtgtccccgaggcatctggtgcactgtagctgacaaacacatgcattttggcactgagtgtgacccaagtcagaccctcctgtgtgtgccctgtcccccaggtcctcccagctccccggagttggggggcgggtgcttgccattcagtcctttcagaggcagccaagggcctacggcatgctggacactgccaggggctggggaggctgggatggagctggagggaagtgggaggtgtacacgggatggacacctcctgtgtatgttccaaatgtgctggaggcctcaacaggtcttggtacaaggtgaggcaaaccttagaggacctaggatgaagtttcacgtaaaggaacagtggctgtaagggctcccagaaagtgtagggaccctgggaaggtcccagtctttgaataaaggtgggtgggaccttattggtagcttggggcattagggcccagatatcaggcagcagcatgaggtgaggcccgggctctgtcccagggcaagccctcctcctgcgcaccacatctggggcctccgaggagggacaaagcattcaactcccgggacctgtgggtgggaatgtccccaggcccagccctttagtgcctgctgatggctgtcacgcggtgtccggccctgatgaccagatatgtgttttcaagagaagctggaatttggatttttatgtgaactctcctgattctcaaatgctggctccgttaacaaaaggcacagtgtggtttaaaccacacatgtccgcaggcagaggaccaccagtttctaatgtctgcgctgtggggcgcttgggtttttgcatttggttcttttacattccttattttattggaaacagcccaaatagtcactgagctgcaactctgtgctaggtgccggggctctatcagcgaataaaacaacatgtgacggagctgccattttagtgggagaagacagtgaataaacatatatcaggtgatatgtgttaggaagcaaatggaagcagggctccagaacagagagcggctgcaaggccaagcccacatttgggtggaaggggcagctagtgcaaaggccctgaggtggggctatgctaggtgtgttagaggcctgtgtggctgcagcgggagtgggtggggaagtgggaggaggtgaggtcagaaggtagcataggtcaaatggcataggagactgtgggctgtggtataagcttggttttaagtcttatgtgaggtgggagccatggaggattcctagggagggagggtcaggatcagacttggtttaacaggctctgtctgggtgttgtaatggctgagtggggcaaggatgggcctaggaggcccagaaggggctattgcacttgtctggctgagtgatgatgcggcctgaacaggaagggggtagtcaccagagggtgacctgaggaaactgtggtcaagcctctccatggtgtaaacagtaaacacgatactgattctaaggacttggtagtaacatggaaatggtgactgtgtataatgctatgtgaaaataggattagaaaattgtacattaaaaacacaccagcccagatgcaaaaggctgcagatcatatgattccattcatacgaaatgcccaggacaggcgaatccagagagacagacaggaggtgagcaattgccaggggctgggggtggggaaatggggggtgactgcctatgggaacaggtttctttttgggagggggatgaaaatgttctgaaattaggtagcagtgatagttgcacaacttcatgaatataccaaaaccctgagttgtcccctttaaaagggtgaattttatagtgagtgaattatacctcaaaaaaaaaattttttttaaggcatgtccagatttctaaccaaaattggatgcacatagaaaacattgcaaggagctgggcgtgatggtgcctgtggtccccactgcttgggaggccaaggcaggtgaatcacctaagcccaggagttcaagactagagcctgggtgatatagtgagatcctgtctctaaataataataataggccagctgcagtggctcatgcctgtaatcccagtactttgggaggccgaggtgcacggatcacctgaggtcaggggttcgagaccagcctggccaacatggtaaaaccccatctctactgaaaatacaaaaatttagctgggcgtggtgatacacgcctgtagtcccagctactcaagaggctgaggcaggagaatcgcttgaacccaggaggtggaggttgcagtgagccaagatcttgctactgtactgcagcctgggcaacgagagcaaaactccatctcaaaaaataaataaataataaaattttaaaaagattgtaaggaaatattcacagtaattgtcatagggtgaaggggattctggattttgtttgttttctgtgtacttttcaatttttaaaacttaaaagtaggcatttctctctaaaatcataaagactttgtgactagggccagagatgggggatccacttggaggggctcagcctctctctccagctcttgtggatccattcagctgcatggctttcacttgggaggttgggagcaggagcttgctctggtccgcgtctctgaccttctggaattccattcctgctcacatggccttggtcaagtcacaggaccagagatcccagcggccctcccctggagagtgtcccagccgcccacgatgcctccacccagaggctgccctgttctgcttgcatgccttcagccgcaggttgctcaccacctcccgagcagctccctccttccatttctgggcagccctgcctgctagcaagctcttccttatatggaggtgaaatctgtcttcctgttgcttcctcagctccctctctgaaccccagtttctgggtctgcagaagggggctcccaggcctctccctgcctaccttggccactgggaggttctgaagagactggaggaccagcagcccagagcctgtgtcggtggtcattcagctctcgggacaaagcgtgggtgggcctgtgccctggtggcataaccaagtaggatttccacattcagtgtctaggccatcgctgtgaaattggaatttgatactaatcctggagattgaaaactcaaacctctccataggccaggagggaatgataatcatcagtgctaacatttacggagggcttgtggcgtggccaactctgagtgacgtttatgcactcatttctatttatcaccagcaaatcccgggccctgctgttcttccccattttaaaggtgaaaaacctgaggctcagaaacgtaacgggaagcagctgggtgcgagcctcctggcacacattgtgggagtgctgtgggtcgaataaggaagctgagcagcaggcagcctctcccctgcagaagggcacagaagcaggactggaaggaaatcctggttgtgggctgagctcgggccatccacttgtcgtggtgggtgaagggtctggtccgcaggtctgctctccaagctgcctcgttgcaggtgctgactttgggaggattctccttgtctcggcctaggagctttcttgctcagcttggggagagaggtagtaatgtcgccttccacctcatggacttcccagtttagaatgctgcttcccatcccacccacatcaccctctgttaggtaagcaggagcagaaatgcagtccttcatctcagctctggaaacgggttcagagagggtgtagaactgcccaggggcacacagccaggacaggcccaagccaggaattgcactgggggtgagcaggggatggctttcctggcttaaggtatgtgggaggccaagagccatcatttttcccaatcctctcctggagagccaggggacatctgaagccaggggctctgcctgtttcctctgcactgtccctgtgctgggctgctctgagctgggcactggtgtggaaggtaaataagcagccccatgacaagctgtgagaccgggcagtggtttgggctccacccaggcccatgcctctctcttctgcttgcagagcctcagtgtctgcatctctcaaatgggctaaggacactcacctcagaggatggctgagaggattccatgtggggtgcttggcagagttagctccagctctgcatgccaccccctcccatggtgcagccacctgggttccaccagggcattctgggatgacaccagaccgggaggagaagtgcgaggagtggtgtggtcattggcgtctttcctctgcctctgcctcccccggccccttccattcacatggtagaaattcagatagcacagcagcaagtgtccctcccgctcctgaccttccagcagtttcttctccatccttccaggagtgatctccacagattcagatgccccccggaaagggctttccattcaaagtttcccctggactcattctggccccagagaggctgtgcccgatccgatcctcgcccctttgcgggtgtgaacttggaggctgtgagagggccaagttgcccctgggaatcgtacatattctgttccacatcctcctcctgttgtccgttccgtgccctcctatgtcaggagtggaggagtgctggaaggctgtgcaacacactgttacccattttgcagatgacaaactatggcggggggaatgggtttcccttagcagagagggaattgtccaagtcatgccaaagacttaagggcatgtcatagccagcttgagtccaggcaggagctgtagccaccagtcgggacaaagtcaggggacttgagaggtcttcacccagctgcggccaggagaaggcctggaaggagcatccctgctgccatcaagtccagggagggcagaagcccatggagctctgagctgagttgggaagtggctggaggggtcacttgtggggtggttaagccacccagagatacccatgagccctggggccagggaacaaaagatgtgtgaaggcaggtgactgacacttgggtgtgtgtggacttctacatagagaaatctccgtgttcttgcatgtgcatgtgtcatttatatgtatacatgtgtatatgtgtatacatctctgcatgtagctgtgtgtgtatgtctatatgattgcatgagtgtgtgtacacacagatgtatatgcccatgtttctggatgtgtgtgcccagcctgagggggggacagggttctgtacgtgtgtgtgtacacgtgtctgtgtgcatgtgtatgtggttttgtgtcttttcatgtgtgtggtgcctgtgtgtctgagtgcacattgtatggagggtctgggggctgcgtatgaggtaactgtgtgattctgtctgactctgggtgtgttttgtgttgggtgtgtctacgtgtgtgtctggcccacatgtgtctggcccacatatgctggcccagggcaggatggaggggcctcctgtgtggtgctgctggactctgttgtggtcaccacggccccgtgggcttagcgtggggcactggtggggctgatgttgccacttaacctcagggtgggatggcatggagcaggcccatcccgatgtccctgggtggcctggtggaatgtgcccacgggatgcccaccactgggggaccccaccagcgttggggctgaggcttaggctgtagcaggctaagaggtccgtctatagcagtggctagatgtctgtggctggggcctgtgcctgaggtcagaagtccatttgtggaagaggctgggagtcagtctgttgctgggattggggagggatcacagggaccagggtcaagagtcagaatgtggctgctgccatggctaagggtcagtctgtggctgcagttgcagatcagtctgtatggcacagaagacaggttaggcctcagccacaccactgtccccagccccttggtggcttcctggcccaggggtaagtttgagccctgggaacaaggggcagagagaagaaagcgcctgtgagtcctgctaccaagcaggcctgggcccagctgttcccatggccatggcagagaaccccagccagcccaacgtgtccagagtgtgtggcttcattgtagccaggaaccaagggtgcccaggaccgtgccagggtgagcagggcagtgcttcccaagtgagactgagagaagacccctgcctgcctctcagtgcatttcctcaggcaccctctggtgcctaaccctgtggctctataaccctccttctctcttctcctacccttctttcccctctcctttatctgctgtcatcctccccactccccaatctgtcttcctttgcagctgccctgtcctctctttcccccagccagcctcctgccccccacctgggccctctgaaccccagggccttgcctcttttaagttcagcagatttgacttcactcagacgctggcgctgaggaaggaagatgaatacccatagtctggatgccccaggagaaggaggctgcatggaggcccagtcacacgcctgcaggcgggggccgtcttcctggagcccatgtccagtgaagggtccacagcaggggtcaaggggggcttagactcggattctgccctgtttgagcctgaagctgcactgacctcatgggatggcctcctgcagtcaagtagggaaggatggacagacacacagatgacagggaaaactacagacagaaaagatcaaaggtcgttcagatcaaaagcaggcagaagacgcctcggtcttggcccagcaccagcattcctgtgcagaccccagcccagggcagagactgagatgtactccctctcccctctccccctgcttcccctggtcgggaggtggccaccaaggcaagccttctgccgtcactccagccagaacctgcatgggtcggggtgggtgggccagattagcctccatcctggaatcaggggagttgggacactgaggggacattcaaatgtttggaacatttgaaaatgttccaaaaatgtaagagaacttggatctctgtactcccgatgctctccacccccatcagctaaaatatcaagctctttgctttcaaagaaaagcattttctcgagtgttttgctctcagtttcacatggtagccccagcttgctcaggaagtgcttggcgttagagggttttgatggggagaaaagggaacagggctgtagttgttgaaggaccatgccagccccatgtgggcagggatgcctgttctgttccctgctgtcccacagtgccctgaacaacgcctggaacatggtgggttccataaacgtataccaaaggagatatgtgtgggcagttggtctgggagacaaaaccggatccatgggggcaggagggctggcagctgcagacctggatcaacatgctcataaaaaggggatattaaggctgggaaactgggaaggtgactggggtagatgaccccctgctgactcagacagggcacagctcctggtacagtcattaaaaatggggcctcttcagcagttttctaagctaccacattggcatgaagggcattaatgtgttggagcaggtacagtggaggctgaggaggggcagggttccttcctgaggcatttgctctcccaccagccccactagcatgaatggcagatcccagcagccgtatccatccttcttgcaagttgctcaggcaagatacatcagtgaatcctgctaaccctgccttcataataaatccaaaatccgaccccttctcatcggccccaccctggccaggcctcatcattgcccacctggactagtgtaggatgcaggcttctgtgctcctgccctggccccacatctgccctcttcacagggagaaactctgaccacccaagggaaagcgtgtcccatccctgctcaaaacactgcagaaatgcctcatctcgttcagtctaagagccaaagtccctacaatggtgtgtgtgcaagcccctgtaggtgtggccccccgtcctctctgcccacatctctttctgctcactcccctcaagccacactaacctcttggccattcctcaaaaatcccagcctggctgctgcctcagggtctttgcacttgttcttccttctgcctgcacagctttgcccccagacagctgcatgcctcactacctttgtctgtcaagtgtgttctcaaatgctcttaagtatgagctctgaccactcagtgtagaaaaacagcccctgcagatgctcccagcccgcttccttggctttatttatttttccatagcacgcttcacctaaggtaacatactacatcatttacttattcattctgtttcttgtctgtcaagactagaatgaaagctttgtctcattccttgctctgaatcctcaacacatagaatggagcctggcatctagtaggtgctcagtaaatatgtaccaagccaatggatgcatacttttgccaccttcaagttacgtgactgggagcaagtgcatttcctggacctcagtgatccagtctctcaaatgaggctgactgatggggcggggggagatacatagagatttgaagttgctgccccactactcaataaacatgtggaatagatgttaaaacctggcccacatctgacctcaggcctgcaggcttccagcgtgaggcttaccagaccagggctgagcttgaatgcgacttctgggtcttagtgtaccagcctggcctgatgggcctccccgtcccttgtttccacctgggtgtccctggtggcctgtcagtgagccttgtccttggctggctccactgcctgcattccctaggaccctgcttagagtccccagccctctacccaccctgcctctctggtcaacagctcctgtttactatttagctctggaatggcatctggacacacacttgcatgaaagcagctattgagatagtgcttggcaaacaaaagggctgacatgtccagacctaggttctccagaacacagcctcacctcaccaggaaggactgggccctttaaaacctgtgagcacccctaccatcccagcgaggagggaggatcctaattcccctggggcagactcttggtgaaaggtgaaatcagaacctagggagcaggaagcctgccagccaggcagcctcctctgctggtgttccagcaacatttgtgggtgctgggtgctggttgctggcaccatgatcccatggaatcctgccagtagggtctgatggagtaagcaaggctttggggtccatgcacacttaggtttgaattgtgaggttgccactccattctgctgcactgccacacgccatgcactgtgcttggtggaggtgagcaaagaatcttgaaattgagagtcggatgggatccgattgtgttgctgtggtcttggcaagttctttgcaggctctcagcctgggtttctcctctaggggatggtcagatcctgaccttggggtactgtcttgtgactctccatgataccacttgtggaagggccctggccaggtcagggtttccatcaccctctggcagatgtgaatggcagccctgctgaatcaagatccctccgtaccactgccccaggagctccagggagtccccagggagccagggaacaagagaggcccctggaacaaatgacaggctctgcccttttttgagataagccacccaccaccatcccatccctctacacccatccccagaatctggaatctgtgaagggtactcactgagcgacctggaatctgtgaagggtactcactgagcgacctggaatctgtgaagggtactcactgagcgacctcaggtgagtcttccgacatgtcctggccctgatgttctccatgctccaccccacccccattttatccaggggaactgttggctcaaagaagagaaaacttgggcttggtcaggcttatgggaggagggcttggtttaacttcattgttccatgcattcactcactcattcattgaacaagtgcttatggaatgtataccaggaaccattccaaatacggaagatacaccaaggaacaaacagacaaaaatacctaccagatacctaaatatgtaaattacatggtatattagaaggtagggaacagcattccaggcagatggatcaacaagtgcaaaggtcctaaggtgagagtgtgcctgctgaattcaggaactgcaaggggcaatgtgagtggggcaacaggctgggactgagggcaggagttggtggggacctgattgtgtgggctgtcatcaaccacctgggggactttctcctcctcatcactcagaaactgaggaggggagggaagacattccagccaggttggtgatccccagcgggcatttgggcttttccgttgccaccttaatggtatacacaatgcgcatctcctggttcactcagcagcctcaggactgagtgaccctggtccccaagacagatattgaagacagagactaagcagtctgacattttaaatatggggagccccgagtggggcggggctgcccaggaccttagggattcacttctggtagggagggctgctaccaggcttcagggaatgccagaaaaaaggtgcccgaggcccacctggcatgtaatgatgggcaggattggctgtaggatgtatagagactttagtatgggcagggttgggggttagtaggtggagaagggagattgggacatcattgagcagcaaaacccaagtgtgacaggtggtcggtgtgctcctgccagagcagaggggcctgagtaggaggaagtggaggtggaggccgaggagaatgagacagacagactcactggccagcgggagaaagtggtgggacgagccagggctgacacatctgtgtgatccctggtgcagtaactccggtagatggatggacacgtggatggatagaaaggtgggtggatgcagcgacggatggatggatgaatgaatgaatgaatgcatgcgtgggcggtgagcggccgggagaggggcgggccagctgagcgctcaatcacagccccggggctcggcgcccgccagctgcactcagaacccccctcaccgtggccctgccctgtggcgcctaattacgtgcccccagggctctggagcggctgctgggactgcagcgaagaggggcccgcgccacctccgccaggctccacgcgccggccttgagtgcgctcccctcggccgccgggaaacctagaggcgcggtttggccccaaggtccccggtcccgctcttctttgtctcggcctagttctcggctgtctccgggccgcgacccacctctcctggcggtccttgccgcatgcttctgtgctgcgccagaatcatcgagtctcagttctcgctgccttcccggccagtaggcgtctcccccagctggggagggtcccccaaaccctgtgcttctaggaccgcggggccggcaagcggcaggatctccaagctgcgtctctgatgcggctaggggaggcgcgcgatgaaggcccccctcttctccgccttctctctacgccccaccgctactacacgtcgcgctgcgccgcgaccccggcgctgcctgttggcgccttaagcggctcttctgccgcggtgcgatccccgacgccaggaggactaacccccacccgccaggcctcagaccccacgcagatccagccacacacgcaaccgcctgcagatacccaccacagccctttaagttaacccaaagccccgtacaggcgcactgcccctacatgcgcagccccacggccccacacacccaccagcccactcgcaaacaggcccacatggccacacaactgccctctggacactcagccccacgcaggcacaatcccatatacacacaaccgcacacaggcgcaatcccacccacgcagtacctcacggagtcacacaacccccctataaacaatcgcacagacacagccccacgcagcgccacatcattcagtcaaactgagacccagaaacacattcactagcttgtatccagacccccccccccaagccccgtgacattcactcgtaggacagaccagaaatatacagccacattgatacacacacggacctaaacgcacagccaagacctcacccgcaggctcgtaagtcactggaaaaatattaaagcgttccctccctcccctcctctatctttgacatacacacgcctgcgcgcgcgcgcactcttacactcacaccccccgtccctaagcgcgtcggagcctcgcagcgggtgaccccgaggccccgcggtgagagccaagggagcgtctccccggcgccccctcctcccgctcccttcccgagctcatctctcgcccccccgcccgcctcctccttccctgccccctcctcctcctcccttcccccgagtctggggcgcgggctgcgcgcagccaagccccctcatcgcgcgcccctccccgcgcgcgccccgcgccagcatcgcgcttaccgagtggatgcggccacggggccgtctctaattacctcctgacccccggcggcctgtgaataatggctactgagggcgctcgcaggggctgctaagaaggaaacgcggggcgcgagaggcgcggcgcgcgcgggagcgcgagggaaaggagcgagcctggggccgttgcaagcggctggcgagagaaaggattcgtgcgagcgctcacatttgtttctcccaaggatctcatctggccaccgcgttctggaagaggcgagagggagagcgtgcgcgagaggagagagacggcgggggaaagggagacggcgagacgcgcagcgccggcgcccgggagacccaggaggagcccgcaggtattgttggcggcggagctttgtgttttcggcgggctgctgtgggcgccagggctccccgagcccccggcccgccgccgcgcgcagacctgcccggagtccggggctgcaggctggggtcgccgcccgccgcggacacccctcccgcggcgccaggatcttggctggagttgcggatttgcatgtttgggggttttccacgctggttgagggaatcggtctcagaagaaggaatttctttctttcctttttttttttttttttttggccgcttttggccacagtttggttgtgctggggattcccccctcccctttcctccacaaagcattggtgagcggtcttgacgaatgtggtattggcggaaggcatggggctgagatggcggggctggtggccacggatggggaggcgagagatgccagagaaggaaggagttctgttcaagttcgcaatctgcgccccgaagctggtcggaccggggagggcgatccgcgcgtccgatcctgctccgggcaaccgatgggaaacttcccgagagcgcggcctccctggggactcggcgcccctgacgcctccaggcgcttcctcgggccgctgcggcccctcctcgccgcccgccagcgcttaaggtcgcgctctccccacccccgccttcctcccttcctcggcggcttccggatctggacagagctgcaggagtggcttcaaacacttcccctggagacccctccccactccccgcacgagagcctgcccagtggcccccctgccctgcgccccagtctcacgcgcggtcgagtggccaggctgacaatgaaatctcgcacctctgccggggggagtggggtggggaggaggtccctcctggggctgctgaccctgggcctcgggcagggggagggggctcctgggggaggggcttgttttggttagagacgtcgacctgggatggcgccggggcagggagggggctggggggtgggcgcggcgaaggcggcaggcttgggttcgcggccgggggtcgtggatggcagcccctcttgggcttggtgattggctggtgacttcaggcacgtcgagggcccctccaacctcagcctcctcccctctggtacaatgcgggctgaaagaggtgatcccgagggtgctgtgcttgtgtgacgaagtgtttgtctcctgcgatcctcagcagacgctgctccggtgacccggagatccggacgcctcgacccctccctcagggccgggaggagaggaggatgaagggggaggagagtggtgggaacttctcctttcccattgaggccatgggaagggaatgctagcccagaaaatttctggggaccgcagttctgaggcggggactcaatccaaggggggaccaccgggtcagaggcttcccggcacgcagaagcccccagattattttgctccatcgggggatgcagaggaaggggagaggtggaagagcgaagggctagctggactggcgttgcgggggtggagagcccgtggaaatcagccttaattggattcccaggcaagcagccaggctatcaaggtgccccctcccctttttcttcctggggtagagagccaggtccagagacaccaagctggcaacccaggcaggtgaaggcaattcctctccctacttaaaaagagaattcctgggggagaggggaggcaccttttgagagggaggggggcggctagactgtgttcaggctgttctgtctcttggtccaggaatagaaagagttaaccctcccccagaaatttgtcagcccccacacagcagggaaacattgttggaccctctgacatgctaacagtgtgacaccggctgactggagctagcagattctagaccctggactcccccttcaaagcccaacaggactcggctgggtggtgccttgttcagggaccttgtgggaggcggaaatgagagcccagagagggtcaggcagcaaagcagtggccttgtggcccggagggaagaggggttacaagccagggccatcggaaactggaagggaagtcgccatgggtctggggtagagggaagggagaggcccttctaccctttgcccagactcctgagcaaggctttgccctgctccccacccttcccacacacccactcagctgcaggcctggccattaaatgtgggtgtctgacccataggttggaccatgagaccctagtggctgagggaggcctgggtgaggctctgggaggcaggactgaaaccagcaagggattcactgctgctcatgccctatggcacaacccccttatttatggggctgccttcccttccccagacctcgagtttccgttttcaagaacctttttcttcctatcttccttagggcccccagggcctagcacacagcagtcactcacagtgtcctgtatttgtccagctaaatggagtgaatgaatcagtggtgaatgaatgaaaagggaaagtttctcaattggaagcatctagcccttgtggttttttttaaacctttttgaaatatatattgtaaaatagcattcacagaaaagctgaaaaaaaaagagaaaaataaggttattgacagtcttagagggctctgacaatgttagtattttgatgtagttcttcccagtccttttcgactcggtggttggtttgttttttaaagactttgtcgtcattctctatattcagatgtatatcctgcttgctttgccggcataatgtgagccttttcctgttttgtaaccaatgcttcataaacaccatggttaatgtcttcaggcttttccaatcaagtggatgtaccataatttacttaatattccccttttgtccaacattctggatgttcctgatgaatgatgtagtggatatattttgtatagcttttcttgatacttaaaatgatttgctcaaaatgccactgctgatgccgaaggctccgactgcctgcagtgggagaaacggcttctctagttttccttggataaatgggacactatttttccttccccacaatctagaaccttccatcagagccgaaaagagccttggcaatgaatcacctatctgacctccctcctttgacagaagaggaagccagagcccagagaggggaagcgagtcccaaggtcacacagcagttgctgggctatgcagcagcgaagacccagctactgatttgccatgttggttttcgcatctgaaaagattcctgaggtctttaaggctgaccctgcccatttcacagatggggggactgagaccccaagcttacccctggtgccgccagctggagccccagacaggcttctcggccctcctgggccacccccgactgggtgtgttcacgggatctggcggctacaggctccctgttgcccgccccacctgcccaccacagttccccttcctctttgccatcccattctccagacaaaaagctgaggatccaaagcagatgcagtgagggggtgggactgtaggtctctggggaccctagtggttgcgtccttgccccatgcctcagtttacttgtcagagacctaaccttggatctgttcaggagcagaggcagatgttggcacagatatgaggtatgaaggagtggtgtgggggatggggtgcaccttaaaatctctctctggcccgagattcaccccaggagaccccccggggagaagggaaggagagagagagggaagaaagagttgaagcagagacagtattccccatcagaggacagggactttctgccccctcccctgcagcacaccaaccatccgtgtgcctctgatcctgcttgtgtattgcttaaggggtttgtgtgccttccagcttgggcatgtgttgtgcatgcgtgcctctgtgtgtgtgtgtgtccgtccctgtgtgtgtcccctctgtggtgtcagtctctgatcccatttgtgcatttctggggggaagggagggtgcccccgagctcggtcttgtgtgtgcgcgtgcatgcatgtgtgcatgtctgtgtgtgagcacactgtttcctcctaatggccccaggagggatccaggcatcaggcttttgtgctgcttcaaggttgtggctgggtgggcgaagagagggaaggccttcgacagggaggggtggggttgagggaggcaaaagaaaatcttaaaagaccgtcttccctctggtctccaaggagatcaggctgtgaaatgatccgcacgttaattaaaaacgattatatcctgattgagccattcctgctcacatcccccagccagggagaggaagaggctgagagcagaggatgcaaaatggggtagggtccaatggcagggcatagccaggtggagccacagcccacggaggggagcacaggctgggggagtcaagtgggaaggtgttgaggggcacgtgcccaagtctgattggagcttctcctttgaattttagggactgtcttccagtggtggtctctgagatcccaggagtgggtggcagccacccagccccatggatctccactcatatgccaggcactgagcttgttgtttgcacagatcctgcaagtcagcgcttgtggttccagttttacagagaagtgacatgcttgaggtcatgcagccaggagttgggagccccagattggacccagtcctctgaccccgaggcccagatgcccttcatagctcctagctgcccccagattcccaccatgagcccctacctctgcaggacccctgggaggctggggcctaccatgacaagaacttctccatggcgcccctgaggtggttccttgctgaggtccgagcagcacagggctgggcggctgtgatgtccattcacgtggggagctgggtgactcactagcctggagcagccttgggctgactcaggtcacctttgccaacctgggcaaggcctgcctcgccccaccttgctcctccccaacactggctcatggttccacagcagaccagccacaggtgccccgtgaggctcaagacactgtatccacactgctgggtacctgtgccatgtcttttctggaaggagtctgggcctggtcacgctgggccttgcctggttatctgtctgctgtaagccttgtaaggactacggtggtagaaaagagtagtggtaacaataaaccagacgaccctccacctccaccccagcatcaggtgttgcggggttcacaagcgtggcagatctcagcatttgtgggacctgcctgctgccatacctctgcccactcccatccacccatgtgccacctctgtgttccctgagcccagcttctccgagaggaggagacccactgtggcttggccacacccagaagcaagtgagatcgctggccacgagtgggggctttttctgcttctctgagcctcagtttcccctttgtataatggggatgatagctttttccggagaggactgacaagagagtaaggaaaaccaggtcaagtttgttcaagtgcctggcagccctggaacgcacacagaggcccatttgtgcatttgtgcaactgtccatccgttcagggcacttgtgtgttgccacaggccttgggtttgctggcttctggggagggacacacactgtcacatttcagtgctttctaggagacagtctggggctcaggtgactgtcatctcagcatgagcctctagggggcaaagatgctcactggacccacctgaggctatgttagcaaaggtagagtgggagaagggagagatgtttctgctggggtaggtcctagtgagatttgctgaacctggtcccacatcttagcaggagccagaaacagtatcacgaggcatcagaggggcgggcagaacaggaagtcagcatccacctgttccccaaggcagaactgggagagaggcaggcagatgttcactcattccacaaaaagccctttgcactgaagcaggcagagagaccctgcctgcgctgggtcatccctgcaagatgccacctttcaggagaacagtttttgtgatgttggtatctgccttcctcctaaatatccccttcctgcccttcccagggcctgaaatgcttccgttagtcactgccgaggtcagagcatggaaggccctgattaaaatgcaaactgttacttggaggagtgatcagaagatgaactcatgtttgcataatgcagaggccacccacccctaggccccgcagggccgggcaggcagtgctgatggggttgtggtggctgcctggccctcatggggcgcggtagctcagctctgccagggcagcccatggggatgcagcccatggcgcctgttgcccactgtctcaggaacaggattagatgttgacatgacacttcctggtctgtatatgttgtcacctaattcagcagcacccctacgaccagatttagacctggggccactagtgcagcctcctggcttcaatgctgctgcccagtgatcactgtgaccatcctgcaatacaagtggggcagggacggcaaagctggggctcccagaggggagctcccctgcccaagtctaggccagtgaggccctgccagggctgaggtgtcatatgaggtgctgtcaccagactgggggaccgaggcacaagatgagactttgttggcccaggagggtaggctggaggaggcctttccaagtgtggcacggggcggagaggcagagaagctttgccggtgtcactcttctgtgggtgtcccagccacaggggccttacttcgggcccactcgcagcctgggaccttgggctagagtccctgagtggccgagagagagccctttctaggaagcagggcaggcgatgcccaaggaggcaggctctgcaggagctgggaactgccagagcatcaggcatggtgccagcctggtatgcttctcatacccacccagcccttggtagccctcctagaggtgaggacgtgggagcagaggggccacacacatagggtgtcgggaccagcctgaaccgggtcagcctgaccctgcacttggggtgcctggcggccaggcctgtcctgcacatctgattcatgcctcgtttacaggctgtgtttcattcccttcagtccttccacagtgtctgctgatggcgccaaggttctggcccagatgccctggcgaaggcacccaaagggacaggggctgggtctccaaggggaagcattttgctgcagaaggaagggtgttggctgcaggacacagcatgccagaggcctgggggtgtgggtggcgagcaggtgggattggggaggtggaggcagggactgaggccaaaaaggagtctgggccttgactgcttgaagggttttatcttgaaggcagtgggaaaagatgggtgctctgggcagtgagcaccgctggagcaaagtctcggcagtgggaacacacagggacaatgaggagaggcttaagaggatcagaagaggacccaggtggggcctcagtttcctccctgagaactcctgagtcctctggggtgtgggctggatgagagcagcctccctcctcctggagctgctgtgcaggcctagaatgctggtctagagggaagcagggacctgaccatctccccaacctcttgcctaagcccagagcagctcggcctagccctgcatcccctgtgagctgagcactgggagggactgttcagtctcggctgagaagtaggtgatggtcctgggggactgataattaaagctcagcagattataattccctgaaagaaagctcagcacagagagggaggaacagtgcccagagccttggcacaggctggaggaggattgctgggggaggtggtggtggggggaataagaatgatacctggaaccatcgtgttcagagcttcctctcggtgaggcctcctaggtgcccagccctgggcactttgctgtttccagtcttcagaccctccttgccaatgaaaggttcctgccatccccattttacagatgaagaaactgaggcttggaaaggtctggcaactgtggttcaaggcccatggctggtaagaagtgagcctgcggctaaaccctgggctgtgttgggagcgttggcctccttactgagaagaaggcactgcttaactcagagagaggctgtctgatggcagagtcctgggcaggccacaggcctgaagcaggaacaggttggagcagggaagacccctcaggacattccccatgtttgtggccttctgtctgggagagggggatgggatcaggggtcacactgtggtgactggatctgccattcacttagtcacctgttgtgtgatgccaggcaggtgacgtccttccttgggcatctcctctataaagggcttgtgttctcctggggtttgcaggcttctttaagaatctcttcctccctcattaatcctacaggtcccaactgagcctgttctcatgccaggagctcctggcacactcctttcatcacctgccggagctgggctctattatcatccctatttgacagaagagcacaccaaggcccagaggctactgctgcctggcggtcagccttctcctcaccagttaaacctgcttcgtgcagtcctgctgcccagcttgttgctcctgcctgtctccttggccctgcctggaagaccctcactttcccatgccctgtgcagagcctaccacctcctctgccatctcttccacagagaggccagggcttgagcacataggccagaggttgtcctctggcaatgcccccaggtgggcgctgtttggccagcccaggcttttaaaaataacattggatttcacataaaaattctacattttgcttccctgaaaaaaaaaatcaggtcggcattgcagggccacacacccacagggcactatcggcagagctaccatgggactgccaccttctgagtcacctggttccctgcagttcccactcatgtgccagctgggccctggcactctggagcttgccaccctgcttagacctgggttcctgccctggcatcctggctttccctgatccgaggcagattctatctttgaagctcatctagtaaatgtcaaaactgagaaactgattccaaactgggtcttagtgttttctgagaattctccaggccagaaagaaaaagaaagggtgcaccagatgcggggcactgcgtggggaaagataaggaggtgtgaaaggatgcagaatgcttggggaataataccatgttctccttgcctgttaagtacttggttggcaatgcctgaatactaacaccaatcagattctgcttgttctataagatgattcattcattccaggcattcagatgaccctcacagcatccctgatagagcaccattgtgggtgcttttattctcattttcagcagatgagaacactggatctcagggaagtgacatggcacgccccaggtcccagtaagggcaggaccctgacaagaattccgactcctgactcccagtccagtgctcgttctctctaagacactggaaaaattggctcttaggtgggcttctttctctggcacattttttaaatgctcctttagttaatatgcaggagggatttccatgttctcgtacataaccttttgctgaagtgacaacgtgcgataaaagggtcccaggagagccagtgtaatttgggctgtgagggacagagaataccaatgcagaagcctctgcagaaggcctggctgctcctgggggctgggagacccggggccccctcaccacccaatgcaaaggtctggccatcttgggccctgggaccacgtgtacgttctgattcgtcttccactgcttggtttatttttctcacgtttttgggtgaggatcttggttcctagaggagggaggtctaggcagagagaaaatgagcatccaggacagggggagagattgaggaggatgcctgaggcagacgttgaagccttgtttctagtcaagcactggctagttggggggtatcagacaaaggggtccacatagaaggcaaactgaagggcatgttcaagtgctgttcacgcctgcctttagcccccaacgaccaaaagggggcttggcatagcgagaccctctctctacaattttttttttttaatttagccaggcatggtggtgggtgcctgtggtcccagctactccagaagctgaggtgggaggaacacctgagcccgggaggtcaaggctgccatgagccaagattgtaccactgcactccagcctgggtgaaagagcgagaccttgtctcaaaaaaataaaaagttggggggatgttaaggaggttccagttaattgtggctgattctaaattgggaggcctaacaaatggtacttatcctcccgtgggagcagaccagggctaaccaaggccgctgggaatgggggtcatggagacagagccccttttccctcccacccacctgaaggctccaagaacttccactgcagaggtgtcagggacggacctggtgcagaccagtgggcccacacctgctttcctatgtgcgggtcagagcgtgtaggtgtattacatgcctgcctgtgtgtctgcgtgtgagctccttggacacacacaggggcacatatctgtgcttgcatgtttgtacatctaagtgtgtgcgtatctgtgtgttctgacaccagctcgcgacaccagctcgccctccacaaagctatttccaggccccattccccaagaacagccatctctctctcctttcccacctgacatggggcagggaggagagaatctgtttgaaatctcaacaggacatgggctttgcacctccagagagcaggacttgcttgtgtggacagaggtgacatagaaaggtttcagtttcatccaaatagaaacttactttttttttttttcgagacggagtcttgctctgttgcctaagctggagtgcaatggcatgatctcagctcactgcaacctctgcctcccgggttcaagcaattgtcctgcctcagcctcccaagtagctgggattacaggctcccaccaccacgcccagctaatattttgtatttttggtagagatggggtttcaccatgttggtcaggctggtcttgaactcctgtcctcaggtgatccacccgcctcggcctcccaaagtcctaggattacagatgtgagccacaatgcccagcctttttttttttttttttgagacggggtttcactcttgttacccaggctggagtgcagtggcgcgatcttggctcactgcaatctccgcctcccgggttcaagtgattctcctgcctcagccacccaagtagctgggactacaggcgtgcgccaccacgcccggctgattttttttgtatttttagtagagtcggggtttcaccatgttggtcaggctggtctcaaactcctgacctcaagtgatccacctgcctcagcctcccaaagtgctgggaatacaggcgtgagccaccgtgcccagcccaaagatgcacttcctctcattcagaagtgatttagaagtggcctgggctgctccaggaggtagtgagtgccccatcttaggtgggtaggtgtgcaagcagatgcccaacctgtgccttcctctcttttgtggtcccttctaagcgcaaagtgcctagggctgtgtatctcctggcggcagttctgaggtggccctattttgccaacccagcctggttggagggactgacagggcttctgcccctaggtgtcccctgaacttggcccacaaaaggcctgaggaatataggggactgtgattgtgtgtgtggtgtgtgatgtgtgacagtggacttgtttgtgtatctgtgttatgtgtgtgcatctgtgtatggtgtgtgtacttgtgcgggtggggcttcaagggttgagtgtggatatccatgttgtgagtgtgcattgcgcatggccctggaggatggggggacatttctgggctgtgtgggtattgactgtgaactgtgagtatgtgcacttgggccagtggaggtgtttgtggctagaacgtgtctggagggaactgtgctgagacccccaccgcctctgtcctggttcattccttcccaccccaggctcctctcatggcccctgcccccaggtcagacctgggaggctctcagtcatcccaaactctgaccattcatgctctccctcccagagaccttggcacctgccagcactgctcttgactttgtccttgctctgggataagagcaggcccagcagatggccgagaggtcccaaggaacagaggaacaggcggggaggaggcccagtcactgcttagcttctctgtaggagatgtagaaggaagtgggtctttgtgtttctgcagcatctggaccagatggagagacctttctggagatggcatgcacacttccagataggagctggaacatttccagaaatggaatgtttttagaaatgagacatggtgtttctggagacaggatgaggacgtttctagagaagagatgaaaagcatttctggaggaggggcatttctgaagatgaaatgagaacatttctggagatgggagagggcatttttgaggagtaaagatgaggcttttctggattctgagcattgctagagatggaacatttctggaaatggattctttctagagagaaactagaatacttctggaagtggtgtgtttttgaagatgatgctggagtatttctggaaataaaatagggcacttctgaagatgaggtatttttggagctgaaatgcaacatctctggagatgggatatggcatttctggaagtggaacattcttggagttagggtggagcctcagtagaccactggcatttctggagatggattacatttgaagatgacggggaatatttctggagataagatggagcatttctggaaatggaacattttggagctggggaatttctgggttaaaatgaagcatttctggggaagaaacaggtcattctcagagaagggacattttttggattgaggatgggacatttctagggaaggagttttctgaagatgagggggtcatagctcagcctggctgtttcaaggccacttgaggaggcaataggggagggtctcaggggcccagagaccccacctgtggtccttgttttgcacatggcccgagggagggtcttgcccagactcactcctgctgagctgcagagtgggcttctgaggaacctttccagaatgcagcctttgccaccccctggcccaaaaccctggcctgtgctggaatactaccagagggaggccagagctgcccagtcttactcttggggtccctacctgcttctggtggggtcctggcagcctctaggctcaccacagggataggcagtgactgaatggttaaatttaatttaattcaattttgtcaagccagctgaggcttgctccccagccccctctgccagaagcctgtacctttcctccagtcccccgccccatatccccctaccatggggatacctgagggtggccttattgcagcagacagatggaggggggctacaaggctgaacatgggcaagggtccagggcccttctcgggctcagcctgatttcagggcggggggccccagccacctccgcctactccagagaagcagatattgaggcctgtcaccacttgagcaggcctggagccccagagtaattatttctcttccttaattgaaatttcagcctcagtgatccagcctcagaagtgtaaggcaggcacagagaccctgcccctggtggggggagggggcgccccccaccctggccccagaaggagggaggcagtgccatcccaggggggcaggtggcttcacatgctggtgggtgggcatgaggtggacggctgctggtcaaggaggcagggtcaagggggccagtatggcatagtatggcctgagcactcagtatggcctgagtatggctcaggccagtatggcagctgccatgggaaggttgggcctctccctctgactcctgacagaggaaggtgagggggttgatctaggctaaggtagcatgagggagtgagtaccaggagactgctgcctcctcccacatctggcgggcactgaggggtgggctggggtgggtgaggggctatggtgtgagtggggcgggctggctggcggcaggcccagttcctggttcagggctgggtgaggcggctggcctggcggggcggggtggggtgggcaggagggtgcagctgaggagcctgttttcccggctgctgcggtcaggctgggaggagcctccgccacctgggtggtccctgctgccctacacggccttgggcctggcctgtctgcgggtgaaggcgggggcagaggactccagggaccagcaggaaactgggagaagccatgggcttgaaatgagcctggggtccacccctccgtgagcttctcaaggtggctctgaggtgctggggtaaacgtagcaactgccagcttgcagctgtgtgtgtctgagctcaggcaacccaggcaccacacaggaagctgctgtactcactggaccctgatgggctgcagagggccagagagtctacttgtgggcccttctgggtgtcagtcttctccatctggggaatgggttggcttggtgggagttttcaggcctgcattaccttcaaagggctcatgctgcaagcatgggctgtcctccctgtttttataagtacacgggccccagccttacccagacagcccagcacgctgcccgtagtatcctggggaagggcagcagctgtcatcagtgttatttctgaggtgtgttttcctggcaaccaggaaatttctgtcagtgggaacagcctgcccaaggcctcctccacccctggggaagacaagttgtatgacaagggagacagaggcaattcaaagtgaagaacgggagtgaggccgcctcctccgtgcatattgctcacacactggggcagccacgtgcccagtaaaggctctcttgaaaaccgtggagataggagccaagctctgcaaggccctgactagctcacctgacccctggcatctagaagctcacagcctattcttggtggaggtgtggctatggctgccctccaaggaggggaagacagagatggctggacaggatgggacaagccagcccccaggagctggggaagcgaaggtgggtgcaaatgaaaacgcagaatcccatttgcagtccatttgcttagcagccctgaccaggagggagagaaagaagagggcagagcagggagagatggggagggataaggatacagagagagaatctggcagccaggggtcagggagcctttggccgtaaggcctgggatgcctgctgcttactgaggctgtggcccctcctgccttccagagctaagaaagctttgctctgtctcagctccagacaccgcatccccaccacacattccagcacctgcctgcttcccctgacctctggctgccccacagaccccatccctacctccactccttggggattttgaggtcttatgccaccactccactctgagcaggctcagtctccctgtgttggtggtggtgcggggtggtgagagtggtcctggagcagtgggaactacccggaggccacctggggtgggtcccaggcaccagtccagctggccagtgggccacgggggctgaccttgtcaccttgggcccagatggagggcagcggtgctcggcccttcccccaagcacatacagccgctgagctaacatgactcaccgcgtggcagctccctctccccactgggagtggggatggaagcctccagatgctgcagccccaccctgagggaatcacaggccaggctgagcccttccaaagtggggatagctggggatcagacatcagcatccattgaagggggtgttcacccgcatggggtaagccctgtgcctgggactctgggcttagtgcccagctagggccttgggagacccttgggcttctctgtgctcagggggaaaggagctgtgcagcctctaggggtcctgcctgccccaagctgtgctggtggtccaggccccctttggggaggaccctggccaggggtccctagctcctcctctgtcatccagagaacccttaggtcccaggggctggtggtgttcctcttcctcagaaacactacctgcaagactggaaccctaacacagccacctctggagagttgggggtcacccatctcttctttgctccccacccaccctggtggaagtggttcatctgctctgagccctaaagaggaccaggtgggaaagaggcctgatgccgtgctgggggcttcgaataggtacaggcacttctctaaggttgctgtgtagggcaagaaaatcagctcagagagtgaatgaatttgccccaggccacgtggccatcaggtggcctggctggggtttgaacctgtcttctcagagcaaagctgacttggctgcacctccctggacttcagctttcagggagggaggtccaggcagcaggagcctgggggacaatgctatttttcatattgatttttgtattgacctgcatcctgttgcccaccccggcaagccccaggacagatcccgttttggttttcgccagaacaaagcaggctgtgctagacctgccaaagcagatacttcctcagagcaggtgaaaggaaactcaatcttgtcttttgttactcaaggagggagtgagggaatggctttgcccttgaacagggaggccgtgggcgggtgggaggggtgggtgaggcagtgtggggagagggcaggggcacacatacctgagccgagacaccacccccgcccgccgtcagagcatccggagtgtggtgaccatgttagtattcagcacaagcgcgcgcgcacacacacacacacacacactcgcgcacgcacacacgcacgctcacactcacacacttaagcgcacacgtacacgcacgcctttctttccgtctctccccaccaccctcctgagtcccctctaaaccaggaaggtagcatctgaccagcagagaaaaaaagagagagaaaggaaaagagaaaaagagagattagtgggaagaaaatccgattctggagttaccttagttaccagctcctaatgactcgcagggcgggctcggccaccttcctgagcagggggaccctccctcccgggcccctccatcaccccattaataagacggggcccttgttcatgagttctgccacagaaagggaagaatcaaggacttttcaataagagagaactccctgggtggttttgaatagttgctttttgtgtggcagtgcgggactcgtcctcggctctctgccctggccgcctccctcagctggctctgtctggaactgcctgctcctgggtctccagatggatgagcttgtttctccgggagctcaatcctttattgttcctgcctttcccctcctgacaccctcagcttagcagaggccacaggcagcctttgcgtctcaggaaagcaagagaatccccgaggtggttctaaaaaggcttaaagcccgggagtggggctcagcatgaaggaaacaaaagcacactccccacatccagggtgctgggcctgtcggccagggccaagctcacggccgttgcttcggtgccagtggaaggggaatgaatggaggagagactgggtgagggagatgacgatagaacaggagggagatgggtaaatccgttttatcagacgctgcatatcttaggaaagcacatttcagctcttttggcttttggcaagctggtcctaccctttaattttctaataaaaaggaattacgtttgctgaaaaggcagtaaccagcttcatgtcagtgtctcttgtggagaccataattcccgtcttgggtgcctgccggctctggggtgggaggtgggcttctgtggccacgggtgatgatattcaggagtcaaggggcagggacgtcagggcccacagcagatgccaggcagtgccacatggctttgccctgcttgccccaccctggcctgtccactcccagcccagcctctgatcatggttccaggctcaccacagacagggctggcagaggctcccaagactcacaatagacacttaatgaatatttgtggaatgaatgaaggaattcttactgccgaggcctgaggtagcaggcaagttgctcagagggtcagatcttggtttgaatgaatgaatgaatgaatgaatgaacgagtgaatgaatgaatgaataaaggaatgaatgttctccagagtctgaaactatctatctggaaggactaacctccaaccaaccccactctccctaagctctggcactgaattcactggaaactttgccaaaaataatatcccctctgcttttaacaaataatatgcactcgttttaaaagagagagagagagagaagtgtgtgaagtcgcaagttcatgtccatgctgtcccacacctgagtcccccagagccaagggtgggcacccttagaaggtcctttagaccttcctccaggctctgggaatcccctgcatttcttatctggtttgggggtccttgcacacgcactgttctacaaccctatggggcccctcggccatccctgtccccagtgagatctggatgtggttcagacctccctgggctgcagagtgtcccttcctgctctccaacctgggaacaggagccaggtatttatgtaagtctctgtggggtgaatgtaggaaaacatttttgctattacaactcccttcattccagtccctgatttattgatttttgagacagggtctccctctgcagcccaggctggagtgcagtgacatgatcacagctcaccatagcctcaacctcccaggctcaaaccatccttccaccttagcctcccgagtagttgggacttacagtcacatgccaacatacccggctaatttttaattttttggtagaggtgggatctcactatgttgcccaggctggtctccaactcctgggttcatgtgatcctcttgccttggcctcccagagtgcctcccaatgggctcacaccccagccccagttttaaacaagatcctgaaggcagaacactcaccatgggtaggcacttgataaatggtagcctttgtgatttgggaggaatctgtacccagtgctatgcttggttccacatcctaagcattgcttgtgccatactatatgccaggcccccagggcgcaggaacacacggttccagaggggtgtggaggcccctgagtggcagcgtccaggagcccagtcgctgcccctgcccgcagcagcccatcactgctggtatccagcctccttcagactggtgtatgccactggaaactccaggacatgtgcgcagcagaccccacacacgtggtttctctggggctgcctcctgaccccaatgggcaggcaccaggtctctgaagctcagctggcaaatgtaggagcagcccaggatttggctggttgggcacatgcacggctcccgtcctaggacctgacttaatctcaatccttagaggtggcctgggaatctgaattgttactagcctcttggctgccatggatcccttccaggatcaggaactggcatgaggcataggagggccaaggacatcttttaggctgcatggagcccggatccactctgcagcccctggctgggccgtaggagagcgggcaggctcagggcagggaggggagctaaaagggaatggaggggagaccagcaggagctctgtctgcccgattctggtttgggctgtgagacagtcattgcatttttttgcacagttctggccacacagtatttaagaggctttgcctacagacctgagtgactgtgtgaatggtggcactggtgcatacggggacgcctgaggaggaacagatttgggacttgtccacctaggactccctgtgggattgccagtatcacccctcttcgtcattaattcccagcttgcctgggggaggccagggggtagcatggggttcgggttcccctagggttcaaacaccagcccatctgccctgggtggcccttccctgctaagagcctcagtctgctgttctgtaaagtgggtccagccatttctgtaccctcagggtggccatgagggtcagtagccagaaaggcaaggccccacacagaactggttcacagaaatagcaggcagtttgtcaggggcagccttggcgtggttttcattcaaaatcattttttaattccaaaagaaaggaaatggttgtaaataaagaagggaaggccgggcacggtgggtggctcacgcctgtaattccagcactttgggaggccgaggcggacagatcacgaggtcaggagttcgagaccagcctgaccaacatggtgaaaccctgtcttactaaaaatacaaaaattagccgggcgtgatggtgcgcacctgtaatcccagctactcaggaggctgaggcaggagaatctcttgaacgcaggaggtggaggttgcagtgagccgagattgtgccactgcactccagcctgggtgacaggttgagactccgtctcaaaaaaaaaaaaaaaaaaaaaaaaggaaaactgtagaggcacataaacaggtcagagttcctgtctaggcttccctagaggtctttacttttactagtgtaatctgagtctttgactctgtttgtgggcatttacatacacaattaaatctttactgtgtacctactgtgtgctgaaccccgaggatttcagaccttgagccctgctgttaggggctctcacagtcctggtggggagactgacccctaagctgataaatgacccctccatggggagtgggcctgtaaagtgatgatggaagagggtccacaaaggagggaactaactgtgggttggcaggacagggaatggggatcggggaaccttgaagggacatggagtgtgaactgggactccacagagatcacaagtttttaggtagaagaaaggagagggaaaagcttggaagagcatattctaaggaaagggaggtatttgggatgtgctgactttggagtccctgtgggatggccatgatcaacccactgtagggagccaccaaggggttctggatcttggatgccaggccatggagtttctgttttattctctaagtcagggagccattgaaggcttttgtgtgtgtgtgtgtgtgtgtgtgtttgtttttgtttttgttttttttgagacagggtctgttgcccaggctggagtgcagtggcacgatctcggctcaccgcaacctcagcctcctgagtagctgggattacaggcacgtgccaccacgcctggctatttttgtattttttggtaaagacagggtttcaccatgttggccaggctggtctcaaactcctgacctcaggtgatccacccgccttggcctcccagagtgctggattataggcatgaccaaccacacccagccctgaaggcttttaagcagggaggtaagtgagctggtccagcatgtgtttttaaaaactctttctccagcagagcttacagaagggtgagcagggtgtacccggggggcttgtgtggagtccaggccaggcagggacggtggccagcgggtggaggaagccgtgaggatgtggccggaggagaggggcaggcttgggccctgcgaggtgggtgctgccctgggccatgattgggcatgagtggggagccgagccataccatggccggggacagggactgggtgcgttgttcccacatgagcgttgtggagttggcatgcattgggaggcatccctctgggctcagcccctgcctaccaggccaccattgcccctttcttggccagcagatcctccaccagcacctgtcagccccgagcactggaaacggcagccggcggggcctttgtgcttcaggattccttctccagggacacgggtgatagccaagcccggcagatgcccccgggggtgccaccgtgcccccactcgccatctccgatgctcagctgctccccagaatgaaagaccttgtcacaaagggaggcagggagaggatgcgcttccgtgccgcagcccatctgggagccaacgttattttcctgattgaaggaaacatctgttcagtcctctttcagagcgaggcaggcagcggactgggtcggtctggctctgggcaggaggtagagaacctgggctgagcccagagcccctgccctaaggggtttaagaggagctaccaccgttctctgtccctccctaaactgggagttcaggagctcctgccatccccttaagaagcctcggtcactgcctcccccaaggatgggggctgctggggcaaaagccatcgcctgtcccagagcaccatatgtgttttctttttttttcttttcttttcttttttttttttttttttgagatggagtttcgcttttgttgcccaggctggagtgcaatggtgctatctcggctcaccacaacctccgcctcccaggttcaagcaattctcctgcctcagcctcccaagtagctgggattacaggcatgcaccaccacgcccggctaattttgtatttttagtagagaaggggtttctccatgttggtcaggctggtcttgaactcccgaccttgggtgatccgcctgcctcggcctcccaaagtgctgggattacaggcatgagccaccacgcccagccccatgtgttttctgaggactccttcattatttcacacacacactagagccatgtttttgaaagatacggctgccaaacaaactgcatttattacataatgattaattcatcgcccccatttcttattaatcaaagacatccataactgcctatctgagctttgagttggggagagaaccagcggggcctcaagctgacagccttcccacccagatcaggggcactggtagatttgtgtcagtggagcctcatttggggtaaatgcacagtacccctgaggtttctagaagaaatggagacagctcacagacccccacacgtcacctccccaaacccctggggctgcctgggatgttttataaccccttctccagccagccctgagctcaggctggctgcttggcacttagccactggctgactagtggcctgtcagaggatgtggaagatggggtgggccagtccctgttgctggaggctgcaattagtggcagcctgggaaggagactgaagcctgggctgaggtcaggaccactgggcagagcttgaggtgagggcaaccgacatagggctgtcctggcagcccatcctgggctgagaacgaattctagggttccaggggcatttgacacgaggccggccacactctgaggttaggggctttttcaaagatagtttggtggcaggggcctagagtatggggagtgccgactgattgggttggagctgccctcttgtgcttagtcgcttctagatggaggccacaggagtgcttggtaggtccaggtggagccatcaattgtcagacatgcaaaaaacttgaaaagatatctcaaaagggccagtctggctgggcacagtggtgcatgtctataatcccagtgctttgggaggtagaagcaggaggatctttgagcccaggagtttgagaccatcctgggcaacacagtgagaccccatctctacaaaaaatttaaaaaattagctgagcatggtggagtgtgcctgtggtcccagctacttggaggctaaggctggaagatcacttgagcctgggaggtcgaggctacagtgagctgtgatcgtgcgactgcactccagcctgggcgacagagcaagaccagttctacctggctagggtggccccagagtcatggcggaaggcgaaaggcatgtcttacatggtggcaggcaaagaatgaggacacccaatcttctttactcattcatctaacactgactgtgtggcctggcacccaccaggaatgtccctgccctcaaagtctttacaggctgttggagatggggcagatgcccaaataagtcattgttgtcccaggtagtgccatgccaggggccatccagggagctgagggcccagtaaaaaggcacttaaactcaaatgcatggagaaggggacagccagggtgtgattagggaagacttcctgaaggaggtgctgctccgagaaggttgattgggtggtttttgtaggggttttcttgtttccactttttaaataactacttcatgccacatgctattaggtgcttttcacatacatcgtcatgtttaatttgtaccaacaaccctgtgagataggaaatagcttccgtatgttagcagtgagtaagctaaggatcagagaggggaggttgcttggacaactggcttagccatgattagaactccaataggttcttaaatgatgatagaaaaggtgtaggaggatgggagccgaggctggcatacctggcagaagaaacagtgtacgcacgcgtatgtcggtggggcactgtggtgtggagggctgcagggcttggtagcactggagtgagcagaggcgagcctgaaagctggcggcagggacctcaggggccatgacaggtatgtgagtcaagggagtgatgtggtcccgctacaaatcactgggggcttcagcccctaatgggacctcctctagctgcacccccctccctgcctgtgccctttttggcacctggtggcaggcacacctcaaagaactgctgcatctgttcctgcttctgacctcaggagacagcagcagggctggcatggagcatcagggaaatgcacaacaacacatcagcccctgggggcctcctggatctccccacgaatcctgcaatacccttcacaaccatccccgtccagaaagaggctgaatggcggccagcatctgcccgtcagcagagagttcccgctcttagcaccagctcgcctgagctgcctccagggacagtcctgcccgcctccccagagagccagtgcttccgctgccgcctaatagctctcccggctggagacgactcttgatatttagcctgcgtggcaggagccttaatagcagcaactctccctccctgctcctgcctcctgagccccagagacagctctgctcacctcctagccggcatcctccacgcactgcctaggcatcaggcggaggtctttctgcccactcttggtaacatcaaggaatgaatgagcatccaggagcacttcgagtgtgctattttctcctctgagattcagagatgccctttgagaggctattagcatggccacaatttaaatatgaggaaactgaaattcagagaggggatgtgatggagatggctcactttcgcttcatcttccccccctcttggtaccaggaagtggaccatgctccttcaggcctcaggatctttgcctctgctggtctttcttgcctggaactctctctcctccttctctctcatagatctcatctcagagaagccttcctgccctggtttatttactaaggttggtccttcttgccatactgtaagctccatgaaagtggggagttcccctaccttctgttgctcccctctgtatccccagcacccagcatagggcatgtagctccactagggcctcattaagtatttattgaatgagcaaatgagtgaatggataagcacatgcctgtactagttagggtaagatcagctgcagcaacaaaccaacctagcatttctagatggaggtttgtatttccggaggatggtgagtatttctggtgggtggaggtttcctccacatggcaatgtggccggggcatggtctgcatcaagctggcttagtgtggagggtccaccctggaaggagatatcacttgcattcacattccattggctggagcacagtcatgtgaccatgcccagctgcaaggaaggctgggaaatgtagtccagctgtggctccaaggacggagaacaggttttcgtgactccaaatcttcccataggttgctgtattggtctctctaatcagcagagccaaccgttaccgagtccttgtcactataccctgttgtaagcccttttctcaaattagtccattttattcttacaacagccctacaggagggtattataattagcccagtttactgatgagcaggcaggggctcaaatgacatgttaaggggaaaatacccattagaaacatgatgggccgggcacggtggctcatgcctgtaatcccagcactttgggaggccgaggcgggtggatcacctgaggtcgagagtttgagaccagcctaaccaacatggagaaaccttgtctctactaaaaatacaaaattagccgggcatggtggtgcgtgcctgtaatcccagcaacttgggaggctgaggcaggagaatcgcttgaacctgggaggcggaggtgagctgagattgcaccattgtactccgtctcaaaaaaaaaaaaaaaaaaaaaaaagaaaagaaacacatgatgggtgtctggagatgcagcagccaaaggctgagaccctcacccctgactccaccaaacattacagatattcaaatagacaggccagtgtccagaagaaatttatgcgggctgagccacagttgctggcctttgttttctctggttttgtgcttgtccaagggtggggaggtggttgagtacatctctctgagggtctgggccagggctcagcacttcatcatttcagctgtccatatttggagggcatctgtttccttccgccttccacagaggaggaagatgggtacacatgtggctagtaaccattagccgtcgacttccggttttgtctttctggctctttatgattgacaagtgctggcatgttggcctttctgccccttagcagccctccatgcaggaaagcgggagggaggggtgtgtggccagtgctaggatggggtctgtatggaagagtagctccaggaagtggagcctcatcaaggcaggtagcccacgcttcccgaggaggtgacatttggtcgggctttgaaggctaaggtgggagtctgtcagactgaaaaggaaaggcatgccaggcagaggggcctgtgcaaaggctaagagagcctggcttctcggctcctgtgtctgctttgcccctagagcttgcccagaacagtgacctaagtctgagatccttccgacccacactgcagagggaatgtctcctaaaactactgtttatctcacctcaagctggtgttttccccttgtccgtagagaaggaaagggtagcaaaaaaagaaggaaggtgaggagggaaagtgaacagagagcgactggactgagcacctgctggcttgctctgctgtgtcactgccataactcttccctagctatgcaccgtggccccttgctctcctgcgggcacactactgccttgggcctttgcacgcactggccgcctgtcctgcctgcagtgctcttcctggagagccacagggccgattcctccttctccttagagtcttctctcaaattacctctcttgatgaggcctgccagaccaccttatttaaaactacgaacctagtacccgttccccttagcgaatgtttcccccagagcactcagtcgcggtgtaacgccctgtacaatttactgatttatgttgctgcttattggctgcctcccttccgtgcgtctccccaactcctcccatagaagccaccaagggcagagtttttttttattttttgtttttttaatctcttatagtggtggatctcaagcacccgaacatagtaggcactcaataaatgtttgttgaagtatgagtgaattcagccctgggcaaaacgtgaccccatttcacagactaggaagtggaggcccagggtcttgcagccctgtggggagagggctgcccagcgccccgcaggagcctcccgcccggcatacccacgggccagtgccgggactgggcgcggggcggcgcgcgggcgcaggtagccatggtgacagcgccccagactactcgtatttcctgccttttgtgttcgcacatgccccagcccccagcccgggcagacgcccctgattggccgtcacactgcggaggggcggggcggggtgagcggaaaggggcggggctgacctgtgggcggggcccccggggcgaggctggtcttgtactggcgcgcgctgcctgtgattaacaggcgggcgcggccgcgcgcggctggaaaggggcggggcttccggaacagccgccccgggagcctgggataggggtgagtgctccttgatggcggccccgaacaaaggacgcctccagacccgggcttcctgtccgtagtttttcttggcccttggagtctgagagtgagaggcctgctaggccagcgccccctaatcctcatccggccgtgggtggccaggcactgcagacgtgtccccgggggccgaccaccttacttgccacgctggcccctccctctcctcaccaccacagggcctttgcacgtcattcctggacactcttaaagtccttctttccggccgattcctcaccccctcaggaggctctccacacagaccgtgacctgccctgcctggcactcctctgcccagcgtttatatctctttttgtgcactctccgccctcatcacacgtgtgcctcagggcagggccctgtctgtggcctggcacacagtaggtgctcggtttgtgttgttgaatgcctccattcatcaggttgcctgaggcttccttggtgggtggtgccggctgtactggcccgggacttgggaggaagggagacagatgtgccttcagacccagacacagaagagtttgtctccaaagccagggcactgggtcagtgtctggcctggaccccaggcccgaggagcctggtttggtgtgtgcccttggtgaatggcctactgtgctggccagacaggagccccaggggctggccctgcctcaggaggaaggcagggtcacagacacaggctggaggggcctggagtgagggctgctcaggacccctgccgaccagacctgggagccccagcatctgactcttcgtttgtgtattacttgctgtgccttgtcctggcttgacagggttggagtgggggttggagtggtagagcagcgagaaaatctccacaccccttacccccatggcactcccacaaaacaaaagggagctaaactcatgaaatcggcttcacggttatacatggatagccttttgggagttgggtgatctctggggtatatacattgtttcctcaccaacaccaaaagaaaatgcaatttgagccaagctaataacaatgtattaaatcagagcttcctgagctttgctgggtgctataaaccaccccgaagtttgtactaggagcagattcctgggctcaggccaccctcaaatcacagattttaaggggtggggctcaggaatgcccttttattcaaactgcctgtgtgtggttttgatactcagtcttaagtccatcatttgagaaatggaatgacagatatctgtgtctcagaacacatttgaactcctctccaggctctagaaagtctaccgttctctgccccagaccctggctccagattcaagtctagactggaggaactgtggatcctttgggatttggaaaaaagttctagaccctcttcagaaaaatgtgcttgtccacacacacttcaactttgcattggatctcaaggtctcatacctgggctgggtggtctgtaaagcaggggagacctatttggggaaaggcctccatgctgacactcacctgaacctagggccaaagtgtatggttgtacaagttgtacattgtacaaggatccctggaagaaatcgagccactggccagctgtgcagcctggcacctggggtgtcttcctgttttgtacaaaggcattttatgccattcgcctaacccaatcttttttttttttttttttttttttttttttgagacagagtttcgctcttgctgcccaggctagagtgcaatggcgcgatctcggctcaccgcaacctccgcctcctgggttcaagcagttctcctgcctcagccccccgggttcaagcaactctcctgcctcagcctcccgagtagctgggattacaggcatgcgccaccacacctggctaattttgtatttttagtagagacggggtttctccatgttggtcaggctggtctctatctcccgacttcgggtgatccgcctgcctcggcctcccaaagtgctgggattataggcatgagccactgcgcccagcctccctaacctgatctttaattcccctcctgcctcccatgacaactcaagttagtggcactagtaaagttacagaaattatgtgccttagccatgggaaaccggccctctgtaaactgttattaaagccataacaaataatatccgacagcctgtacctactagtgttcagttcctggtactccagagccctaagcgtttttgggcagtggttggggggctgccaccaggcctcaacttgggttaggaagatagggcaagggtgcaaggcccgtctctgcacagagggtgggagagaggagtaactacatagtaggtgcttggtaagcactttcccagtctacattcattgggtccattttatagatcaggaaaactgaggctctgagagggctggtaatttggattagagaaggcccacctgtctggagcggctttatgaacacaggctttggagtgcgacagcggggaggtcaggagaggagaggaaatagccatagctgtacccccacaacattcacaccatgcctccccctgaaggctttgcctgacgtttggactgtttagagggctcctctgagctcccacagcctgagccttcctgtcacggtgctgccaccctggtttagcaggcctgtttacacactgtcaccccaagagcctggcagcaccccagtgctggactgtgagccctccacacagggcccagcgcatggtgtgtaatacagctctatggaatgctgagtggctgattaagtgggctctagcttctggcagctttgctccctgggtggatggggcgggagtgatgcagaaaggagaggtgtaggcctagagttaggagggcagggagagcactgggcactggaaccacttggcagggtgagttggcattccctgtttgccacgaccttggggtcaccctcaccaacttgccccagctgggcctgactgaagggcagggggcctggacattggagcccagggagggcagagggtggtagactcaggagagagctctttgtttgggggcatttctccagcagagacccttagtccctccaaggagcatgtcctcctccatcagtcagtgtcctagccagcaggggtgcgtccccccagatccttccctgcttatcctatcctgggcccagccatgctttctcccatggggtcatgtcatcctgaccctcagatttggctgggtcgccccagggctctctgacaaagcccagctcctcccctggcacccagcatccctcagacccggcctacaccctgtcaagcccgccttctcttcaccccaaggcctgccgtgcctcacagcttgggcagggctgtaccctctgcacacatcacccttccctatccccaaccctctccctttagtgataaatccagctggccgctctttgcagctcaccagggaccagtgtccccagtgcggccctcggtgcacccagtccttacgtgagccctagccaccatggaaagccaggagggcctggccagcctccatgtggggtctggttggttattgcagggcctgttgggactgcctgtgtccctgttcccctgggacaggagttctggagcctgcgaaacttaagcatccatcatgggacctggcacgggggtgcctggccacagcaggagtgaatgaattttttttttttttttggagacagagttttgctcttgttgcccaggctggagtgcaatggtgtgatctcggctcaccgcaacctctgcctcccaggttcaagtgattctcctgcctcagcctcccaggttgctgggattacaggtgcctgccaccatgcctggctaattttgtatttttattagagacagggtttctccatgttggtcaggctggtctggacctcctgacctcaggtgatccacctgcctctgcctcccaaagtgctgggattacaggtgtgagcactgcacctggcatgaatgaatttttttatttttggaaactcctttgaaatagtgtgtttgctttccactgtcttgttcttcacctttacctcccttacgtataaaggtagatgcagtcaagtaaagtgtgctagcttcaaatcagaaaatctccatagagtcttccgcaaatccttgagcgcctactacgtgctaatctgtcccaggtgctcaggacacagtgtgaacaaaatagaccaaaaatcctcttagtgaagcagacgcttgagtcgggggcactggagaaagcaaatcagttcgtcggtaacgaggcagggaagtggacggggaggaagaggggcttctgtgaaggtgtgcttggccaggcctcaggcttcccacctgttcactggggtgatgtgcttgcccggtgggaacggtattctgttcatgactgttgccattgttattaaccgcatgcccattgcctttcagagtttgtgggccctctcgggcagcccccagagggtgctgaatgccgggccctgtgtacacttcaccctatctccgcggggtcaggctggccacctccatttacagaggagcagatggaggcccagggagggatagggtggtgtcacatgcttggagcggggtccagggagagctcttggctccctgaggcagggagaccctgagcccagacacaccccagtttataagtggggacagctgtggaggtgttgggtgctcagccctgggcctggcttctctggcctgaagacggcagctcatctggctgcagagtcaggaaagatttcctgagcctggactgagaggccaaggtgggtttgcggaggcaggagagagctccagatcaggaggcagtgtgggccaagccggggggcggcaggatgtgagcacagagagggcagcaacccttctacagaccagttcaattccagtaaccccagcctgccgtaggggtgggggacagcctggctgcagcggggcccacctgccagtgtgtgccttgcctgcgctccaccttccccctcgggcactgcggctttcttgggacagcaggaccccagttaaacagccctgtttcctgcccagccgtggctgccgcctcttctcggaggatttttttttcccacaactcaacaaccactaccacttgcagctaagcagaagggaagttaggactcgcattttgcctctgtagcgcctgtaatcagccccacacagcccccgccgcaggcgcccatcagtgccacttccggagactacttgagatacacctgctcacgctaaaaggagaagcagtaatccatcaaaacaaccccaggcgccggggcgggagaggctgagactcagtttcccctcccatggaacagggcagtgttgggcatctgaagtccccacgggtcctggcattctggaagaacacgactcagtagctttccccttctgggcctcggtttccctgtctgccaaaggtgcagggagatgagctcccagctcatgcctctgggcctcctacctcgcccccaccctcatctctccctttccagagacattataaatcaaacggcttagaacgtaaggcatcagaaattctgaaaccttcatctattattaacgctgacagtaaattccccctccgagcgttttacatagcaactgttaccaagactcggtggtggagctgctgctccagcggccgcatcccagcagctccgggcaggatggcagggccgccacaagccctaccaacccggccaccacctgggcactcagcaaaccctctccaggggatgggcggggagggagcctttggcagaggaaatgggtggcttacagctgaaaggaggtcccagctgcttttggtgagccctgaagaccccagctcctgcctaggtgaagacaaggggccctgaagctcccaggccttcagaggcagcacctatggacagggacgggctccgggagcctcccttccttgctgccctggttagaggaagcttgtgagatggaggacaggaaaaggcttcgtaaactggaaagggctgtgcagatgttgtttaccgactcacccacctgtcagctagacgttcctgagtgcctgtttctctgcaggcagtatctgggcaccagagatttaaaacaaagacaaaaggcccaatccctgtcgcatctggcttggtaggagacagacgcgccaacccctaattgcagttgtgcaatgatcaacgtatgtacgaggagcatactcagggcggtgaggatatcgcagagggcccttcacgggggctgatgctgggcagggttttgaaggatgaacaggggagggtctgtgtgttctggacagagggactggtgtatgcaaaggcccaggggtatgaagctgcccagctgacaggtggattacaggctgacctgttttggtggggaggggggctggtagagggagcaggggtcagagggtgcaggaccttgaatgcaagcaagagagtttttacttagaggttctggtcgccatggaaggttttcagctgaggaggaacaaagatttgggtttggggagtatcaccctaattgcgcagataaggataccaaggcctgcgcaggtgagaacacctgcccaggcaggaagcaggggaggctggctgctctctgcaagctgttaagatgcacctgctgtatgtccatccccacatggggaagggtggtgtgacctcagaccctgggacagcatgcctagagaagaagaagcgggcagggagcttgtgggctcttgccaggtcagagtggccaactacgaggagttgtctcactctttgcatctccagaaatcaggacacaagttgagacacagacttcagcccagctatggatgcgtccgttggcagtctctccacctagtgacaaataatatatatgttcattgcagaacattcagcaaatagaagtctcaagaaaataatgtttccctgcagtctcaccccaccacccccaccctctgatggccaggtcacattttgggcccagttgctccagaaccaggtacagatacacattttttaaaacagaagttgcatcatgttctttctgcataccctcagtgacctgcttttcgcccttcatacgctggaatagttccccatgtctgcacatatttcggggtgaggtttgccaagagccacgctagccagaggggacccagctgacctagaatgttcggtgcttgtcttcaagggcagaggccgtgcctggcctgcccactgctgcactcagcaccaagcatggagacaggcccccagtggatgctgaatgcagagctgtgaaaagaagtggaagctgtgtccgtgaagctgagtacaagttggacagagcccactaggatgctgtaatcttgatctggggctaaattgagtcttggggtaagatttgtgcttattaagggctctggatgcttggggtaatagatggaagtttttcagggagggcttcctggaggagatgggctgtagaataaagcagaagggaaataaatgcataactgtccattcactcatctaacagacatccccagagggctccctcctggtcagagccctgtgctggacaggactaggcacccagacagagtactgcccccacctgctgccagccctgggggaaagacagacaagtgcccaggtcactgtggctgtgtgctcgagcagtgctgtaatggtggaagggtagacagtgaggggccaactttactgatagcccccactttactgatatcccccacctcctagccaaagaagttggggattgatttatgggagggagcagtttggcatcaaggtgtgcctgtagatgatggacttagagggctcaggagggaagcccatacatcctgcatactcgggatgggcttggcatcagggtcaaggtcacccagactgtacccagaagtttggctcagcccagtgtccctggcctgggaactcctggatgccgagggtttatggcagctcagttagtggcctagccctgggtccccgccatggagaggggcccctgacgtccaacgtccactcccagagtcccacaccaaggaggcccccagccccacccagaagtcaaagggtgtatctttccagagtctagaagctggagctgctgtggggcctgggccttggtctcctcggctgtcaaatggtggcaccaccctgcagggaacgtgtggagctaaaataaaatgtgttccaggtgctggtgccacagggcttagggccacactgcagaaaacccttcctcctgcttggtcctagctgcccagggccaggccaagaaaggcttcaggaagaagcccccacctcctagccaaagaagttggggattgatttatgggagggagaagtttggcatcaaggcgtgcctataggtgatgggcgtagagggctcaggagggaagccccgcagattacccccttgccaagaacctcctagaactgcatactcaggggataggcagctcattcacagtgaaagtgttttggagtcaaacagacctgggttcaagccccagctcattcacttcccagctgtgtgaccttaggctagttccttgtcctctctgtgctcagagtcctcatctttacagtggaaatgataatgatagaccagtattgtcctgagggttgaaagaggcgacccatatgtgagtgcctcagcacagggactggcacatagtaagtgcttggcaaatgaaaatggttcttctaaggctttttttttttttttaactagtgcccaaggaagtgggggtggcagattcctcactggtctcttaggttcctggcacacatgcagccaccagattgagcctctggaatcgtaccaatccatttaccagcccacgtcattagctttttctgagcacctactctgtgccaggcacaggggcaccatggtggaactggaagcagcaggctcgctgggaggctgacagctgtggatcctgacctgtggagtggccagtgccccgggggatggtggaaggggaagagggtatctagggcaggcatcagttggaaagtcacagtgagatttgagaggaggtgatccctgaactagtgacaaggcctactagcattttgccaggcaaactaggagcaggtggaaaggttgggaggcacaaaaggttgggagactcccagagggtgccagtagctccttgtaagtcattgttgctgggcatgaaatttgggagctggggaggtgggtgggaatcccctgtgaatgccaggccaaggaggcagggacagtgtctgattggtgactggggcctgggcagcatctgagcagggaacacagttgagtgggagaaaggtggtggtcactgaggagcgagggcaggtggggggatggaaaggtctcaggacagggggcccagcagggagggaggcatgggagggaggtctcagggcatccaagggacttttggttgaaccagaagttcctgagtgtgagcgcggcccagaaacagccacaggcctcatccctgcactgggctcgaggctggagtgccaccagcagctacccatccattgggcatgcgtgtgtctgctgtatgccctgacaagacagatggactctgccctcacggagcttaccagtgcagagagaaaagagagtgaataaatatacgagggaggtgattttggagagtggtaagagctagggactaggggagttcccttaggcagggcagtcagggagggcttctcagatgaggtgactgggctcattggagaagacccaggaggatggcgtcccaggcggagggaacagcatgtgcaaaggcctgggggtcaggggcatggcatgtgtgaggagccagtgggagccagtgtggttggagtgtgcatgggagcggggtgggaaatgaagctggggaggagtacccctaaccttagacagctaagaggttcaaatttagttgagggaaagttctgactctacccccagcagcaagggagcttccccaccaaagcaggagatctggctctcagcattcactttactttcctgtgtgaccttgagcaagtggcccaccctctctgggcttccagagtctgtggcaacacagaggaaagtgaggtgcttgctcagagactcgccagctgtgactggccaggggtttgatcccagtcatttctgctctgtggtgggggacttgtcgggaggggcaggtagaggtgagctcagtagaaccaagagcccccaggacacagggcatccaggaggcctgtgcttccacagcctgttcactccttcatgcacccgcctccccctccccactgcactcctgcccacactgcccactccccaaccccctcctctctctagggctgaaagcaagaggctcccatgggggctggcccgatgattggcagagtcgataaaggccacttggaaaccctcctgctccaggtggttccccgctggcatttgtagctgggattccgaggccagagctgaacccagagatcatttatcacacagcctcaaatggaggcttttctggaaaaaaaaaaaaaaagttctttctctgagattccaacttgcattgtctaaaacaggttaattggcaacaccgtttcccccagatccttccctgcatccccccgctttcctggggtgggaatggcagcccctggaagtagagaagggggacaggtttaagacacgccgcattttcagagcttgctagccatgtggagactgccagaggaatcctagagatccacccagtgaccacggctgctgggctgcacttagctttgtgatccagaccgggagctgcctgtgaagtccctccccaaggagctggaggtcaggagcctgtgtgtctcactcccttccttgcttgttcctatgggaaatgacaattgaccactgatacacgcccgccctcaaggagctgctggcagcagcaagaggggtgagctgtgctggggcagagggggcaccgagggaccctgggagccaaaagacggggccagcccactctgccggagtggccaaggagcaaaagcagtctgcctggaaggcaggcagggagaagtgtgctgggcacaggtacgggggcccaggtcataaaagaacctggtgcatttgaaaagctgtgagatcccagcatgcctggagtgtagaatccacgggactcatagtcagaatgtttctgtttcacaaagccagagaggttgggagggtccaggccacaaaaagcctagaatgcctggttgtactcctcaagataggctgggcgtgctgcataacaaatatccccaaatatcagccccttcaaacagggtttgaccctcactcatgccaggtctctgaccagacagctgggaaactgctcactgatgtcactcaggacctgggcagacagaacaacagccattagggctattttcgtggcacagagggagagagacaggtgtacagatgcatggagcttcctaaagcagcatgtggcacttccacttgaatttcactgcaaagtgggccacatggccatcctccggacatctttatgggctagtgacacgcttgctgcctttggctgaggaggacaggaaatatttggtggtggtgccgacactgaccacaaagaccaagaaggttcagcactttaccctgagcaaggtgaggagccttgggagggattgagtagagtaggctgcagcctcatttagttttactttttaactttttattgacttgcatacagagaagagcacgaatcataggtggacagctgatgaatttctgcaaaccaaacacactcgggtataactgaagttcagatcaagaaaaagaacatcaccagcccccagatgtcccttatccccctcatcaggcatttcctgcccaagagtacttttgtctgcctttgagtttcacagacatgaaaccttttctgtccaacttcttttcctcttttttttttttttttttgagacaaaatcttgctctgtcacccaggctggagtgcagtggtgcgatctcgcctcactacaacctccgtctcccgagttcaagcaattctcgtgcctcggcctcacaagtagctgggattacaggtgcctgccaccacgcctaactaatttttgtatttttagggttttgccatgttggccaggctggtcctgaactcctggcctcaagatatctgcttacctcggcctcccaagtagctgggattacaggtgcctgccaccacgcctaactaatttttgtatttttagggttttgccatgttggccaggctggtcctgaactcctggcctcaagctatctgcttacctcggcctcccaaagtgctgggattataggcatgagccaccgcgcctggcctcctcttcttttactatttatgagacctatctgtgctgtgtgtggcagtggtttttcattattgtgtagtattctattgtgtgcatatgccacagcttatttctccctcctacttttgatgaacacttggattgtttataatcggaggatcttcggtggcttgcgcctgtattcccagcactttgggaggctgagacgggaggagagtttgagaccagcccaggcaacatagcaagacctcatctctcaaacatttttttgaaaactaaaatagttggaggatcttgtgaatatacctgccgtgaacattctccaacacattgtttggttcctgtatgtggagttcccattcaatgtgtgccttggaagtggaactgccatggtctcatttgcatttaagaagcctctactggacacacagaagagaccgaggtacagtccaggcaggaggtggaggggaaggtatgtgggcccagccctagggctcctccacctcagaatccagaaacatccccagcgtggacttgtcttccaggcgacttgggggtctgtattgtacacacaagatgaaaatcgtgtaaagcaaggcccagacacatgaggctgagtgtgcagccccaaacggcaagacgtaggccttactgtgtgagtcacacggtggtgttatagcacattctagtacacaggcaagaatagttgtataatatttgaatgcactgaactcacttccaccaggtacacgtgtgaggaatctccctgcaagtcacccgtttcacaagagggaagacggcccatcttttaagtcaggggaggggaccacttgccctggggcctcgggctggggttcagcctgcctctgttccccactcttggacacacaggatgaagggccccagtgctgatcgctcacaggggtggtaagacttaccctgttaccctcttggggtgtggcatttcttagaagccaagcatgggtaatcctttgcctggaatgaagccaggagaatggtggggcttcaggctctggttctagaagacagggcttcttgggagctgcccctggagcctcccagcctgagcggtaggtgctggagctggtgcctttgaacttggattcatcacagggaagacctggggtccaggcctggttccgaggtgcccaggccagcccctgagcagccaggcggccttcttgtgaactcacattgtagtgtcccgtgcagctgtcctggtcctgcaggatgcattccccacccccaagcccttaagggctgttgggttttgtttttaagaaacatatggcctagttgttactttggctggcctccccaagcctcatgtctctgagacccccactcctaaggaagggggccaggcattgatgggggtgtctgggaagccgagggaggatgcctgccagttatgagaaagatgcatctttgtcgcagacacatgtggggcgctctatgtaaattgtttcagcgcctaacaggaagaagaaaaatgaggctttgatgcgagccaccacctctcagccaggcgtggtgtcactcaggcgcgtccgaggcctgcttctattaaggagctgtaagctcttctcaggccagagacccagggtgctctctgggcaggaggtggctctgctctgtctgccgaactctgggcgtcagcactggggcgtgctggggcctcaacccagccccacctccaaggcaggcggagagcactgctgatggattccccagcactgcactgtgcgaggcccagggcggggaccccagcaggcagcgtggtagggtttgctggggatgacaggcaggcgcacaggcggcggcactgttaggccccatgtgatggccacagcctggcacaggaatcggtgctccaggcagcagacagcaaaggtgtggaggcaggaaaggagccactgtctctgaggcctgggagagcactgcgggtgctggagatagatggtggcaggggccagctcaggggagggcaggaatctggtcttgtggctttggaagcccatgggttgcgagcaggagagggtggggtggtgtgagtctgagggaggtctcagatgggaggggagggcggagtggggcagggaccagtgagggccagagtggagactgggcaggagggcatagcacacacatggacatgcttcccaatgagccctggcccagtcaactcccagctccaggaaccccccacagccctttgctggggtgcacaccgtccagagcactgacttccccaacgagccaggtggaaatgtcccagggaggaccccggggcctgaggagcctactgaatcctcaacaaagaagggaagagaggcctaggccacagcaggcccagaattattgtgttatgctctggatcttggggaatgtgtaatccccacaccgtatctatggcaactctccattaaccagaatttggttctacaaattcctgttcccattcattctagaaaactcagagctgttggtctttttaaaaaaactcgctgaaaaaaaaaaaaagatactaaagaatgtaaagaagaaaatgaagtcagctccagcccctctgctgagaacacactgatgttagtactttcgtgcatttccacccagtttgtttaagaaaattgggattgtgttgaatgcctgcttttgcatcctgccttttccattgtgcttcagatcatgagcatttggcaggtcagaaaaaaaatgtctttggaagctgggctgtggggactggggtttggaaggcttgctgtgtgctgtgatccttcaggggtcatcgccctccctaagcctcagcctttgcctctctgcagggagagactgaaggacatttctcaggctcccgccaagagtctcagtgttttccttgcaatggtggccttgttattccagccttgctactcacaggtgggcctggtgatgtttgtggcagggtgggcacagggctggcactgccaccaagtacgtagttgagccggtaagctcagaaacgtgggctcactccagccttgagcactttcccatctcgtgatcctgggcaaatgactttgcctctctgaacccctatctcttaagctccagaaccgggtggttgtgatggttcattggcttaatgtaagtggaactcttagcatataataagtgctcagtaaagaggaactgttgctaccctgaggattgctggtatctgtgatgtcacaggtgtaatatgaggattaaatcatgaccttcttgcagcattcagcagaatgcctgggacgtaggggacactgtcagggggtggcacctggtcccatggtctagccaggactatctttgtggcccttaacttgtgcagctgcccagggctggcgctcagaaatggcctgtgcttggtgcatgctgctctgctgttgctatcttgagtttttattactttgtgagcaagaggccctacattttcattttgcactgagccccacaaattctgaggccactcttaacaagaggattaatccctagggcagactggcagggcaccccacacatccacggtgctcaatagctatttggagggtgaaggcaggactgaatgggccttggttcagaggagaacagtaccccagcgaggccaggtggcttgcccagtttacacgccagacatagggccaggcagtgctctgaccatcacgtgaggggctgtcagggcgacggtgtgtctgtcaagggcaggaagtgggctgtgtggagtgccagccaggatgggcagggtagcctgcgccctgctgacctgcagccagacacactggggagacacaagacgactcaggttggaatcgattgaaaccaagccaagagcttgggccttggagtgcatgggagggggaggaggttcagacccaaggtggcggctgcggctggtgttagcacttcttcccggcagggtgggcagggccccattaggggaggcaggcctggatgccccccagcaccctttcatgagggggagagaggagaggagcaaggcccaggccacctggtattcagaaggctgaagtgacagtgtcaggcagtttggggggcagatgaagccgtggcaaagggtggccaggaggccagagcagcactcacagatgaggtgggattggggccacctgcatgtgtggggaaggagcccccaggactcggtgtgtgggcctctggctgacaaaggccactctgcagaaaggaaattagaaagaagaaatgatttcttggctcatgtcttcacgaacaagggagaaagttgctggcgtggtctcctcacagaagagccagggtatctgaggggagccctttctctgccagctgggtcaccctcagggctggaggtgctggatgccagagtagaagtggatggatgggggtgtccccccaaaaggagagggagacaaggtgaggctgtgccttttaagccttctgcgcaggcctccttgggacagcccgggtcggatctcagactgcagcatgtggggctgggagccagctcccccgaggcacgggggctcaagaggtctgagcagcatgctgaggtcagggctggaggagcagaaagtagtagggagccactgatggcgtcataatgaaggagcgacatgacaagcttgtgaggggccacacagggcagaggctagggacgaggagatcccgctggcagctgggcatggaatttctggtgggtagtgaaacagccagacctaggacctgtggcagtgaggatggggagggggccagatgggcacacttcaggcaggggaaccccaggacttgggggcctcctcagagaggccttacagaaggactggggcagcaagcaaggcctgtggggcgaggaggcctaaggacaccatggatgcactggagccaagccattaaggaccctgcaccccggccagaggcctcactcaggatggctgcagtggagactgaagagatgggtcgggtggagggaaatgggctttgccctcaggaggtggttgtgggaggagatgcggtcacccgggaagagaggccagaggatgggaccgaggagcagcgacacgggaggacggcagggcgggtgagcgggggggccctgcccagggtgacagggctttgctgggccctccaggaccctaggcagggtctcccctggaaccaggcggtacaaggcctgtgatgggaggggcgggaggatgagggattgctggcaggagggcctgggaccagaagtctccactgcagccatcctgagtgaggcctctggccggggtgcaggatccttgtctacctgcggggtagggagacagcctgtctcccaaagggcggtggggtggctgagcctcaaggacaaaggcaggcgggggcaggggaaggagcctgtggctgggagcttaatggccccgaaaaaaaaacataaaaccagagaattatggggagacataaacagagctgtcaggcattagctgcagggagacggctcagcctgggtaagagatgctggcggctgagctgggatccttgcgtgtgcataaaaaagacagaagttataaaaggagggagattaagaagatactgcctcttccatgattgggctccccggccaattcctttctcacgccccggctgaggccccagtcgcacactgaccctaggggcctggcctgcgaggcctggccaggtcaggggccagggcctgccagcggccagggaggtccatgggggtgggtgggggtgggtagcgacttggcccaagctagtggaggggccggggagccaggcccaaggacgcaggcggcgccagccccagcaatttatgggtgctcacacaccctgccgtcttcattttccccgttgctgctgctgtcattagccaagcactaatgggcttaaatttcaccttaaaccatccccactgtcctcagcagatgacaaacgccctactctcgccggctgcaaagctgctgggcggcctccaagcaggcatgtgccctccctctgcccgtgtcctctggccctcaataaggaggctcctaaggacccagggcctgggatactcacaggccgggagaattcctgggggtgtctgggagcccaaggaagggcagggctcaggaaagggggcttcagggggatctttggagaccctgggatgataatggatggggagacaggagcccagggtccaggggcaccccactgtttggccttggcagggccatgcccctgaccctgcccaggtgtcatgaagaagggccctaggagctacccgccatgtttttaaaagccttagggaaatcatattttgcttaggctaacaaaaatagcagtggctttgcttggggttagaattccatccatccatccatccatccatcaaattcgttcactcattcattcagcaaatgtggcccatgagcccctggcctgagcaggtccatgaaaggcccgactagctgttcatttgaggcccatgagagggaacaagtgggtgatctctaaatgcagttcgtttgggagacaaaatcctttagcagtggctctgaggatgggaggggaagtgaccaaggggctctagaggctgtggggacagagtgcatcaacctggggtgcatccagtccatgaggcgggtgtttgcccgaaaaggagacaggaatagagatggagctatggcagagatgcagggattgctgggggctccctgctcatgtgtgcacatagccatggccaccgcctcccgcctttgtttcccagcaaggggcaggtgcccgaggagctgctggggttgatccaccatcaaagccggcctgtcgggggctggtatgcagagtcatccctttcccatgggaatctcgctcccttccaagcccccagcacccgcctttcatccctgtgctgagagccagtactcccactgacacccaaacagtgatgccaaggaggcactgccagagggaggccaccaccatacaggcctggaatgtcacactctctgtccccaccaccccccacctgcagtgagcctaggggaaagaacaggctggcacaggcattaactggagatggagggtggtgcatggctctgggccaccatgctgtgtgtccccttgtcctctctgggcctcagacatgcaatctgtcacctaagggtattgaccctgccaggctctggcacaccaggaaatgtaagccagactcaagggttggcaatatgtacgggaggttgggtgaggcatcttctccagtccaggaggaagggattcctaactggtgcttaggaccatggactttggagaaatctattcctccccaccagtatctagaattggctgtggagtcctgccaatgctctgttcctgacatttctagaatttctccctgcatttccagcccctgccaccactttggtctggccccattattgctctctgggggacagtcccagcttcctgttcactggcctcctggcctcccctctcacccccatcaccaatccatcctgcctcactgcagccactgcagactccccaacacacatgtgtgatgctcactgttgctcactctctggggctccccgtggccctcaccacaacatctgtgctctccactgtggcccagagggccacacaccacgtggaccctgcccatctctcatttcttgcctctcacttccactcgagagccagcctgcattctcactactatctctcactctctcctgccttccaggcttttcctctttcccttgctaactccggcacatcccctaggtctcaggtgaagtgtcactcccctgggaagcccctctgccctcctgttcccactcaggtatgacgtagggccctttcccatgcgctggcacttacttgccttctccacgaggctctgagcccacagctgtctctgggtgctcagtctctagcaggtgtatggcatacagtaagcacttagtaactgcttctgagatggacagatgggtatgtgcaagggtggatgggcaggtgggtatgtgtgcatggatgcatggatagaaagaaggtaggctggtgagtggatggatgggtgggtgattgtgaggtatacaggtgagtgagtggatgggtggatggatagatgggtgtgtgtgcatggatgcatggatagactgatgggtgggtgggtgggtggatggatggatggatggatgggtgggtgggtaggtgaataatagatgggtggactgttgtgtgggtggatggagaggccaggtggtctatgaggtgagtccagaggcattagaaaatggagttctaagcctttggctttccatgggccccaatttctctgtctgtaaaatggtcagctcagctcctgtgcccagcgtggaggctcaggatgagctggagagaaggtggaggcttcagcaggcagcacatcaggcgctccacagacagtgcatgggacagaacaaggttgcttggcgtccctgcagcccaagggctcccttcttcagggggacaccgatgccctcctccatccctgcttgctcccaggatccttgcccaggtagcagactgggaaccagacccatagagttcaaatctaaacgttgctgctcaccaggaaattccctttgcctcctaggccttaatggcacatctataaaatgggggtgctcgtgtattcatgttctttgcagtttctctggggatcaaaacaatgtgacgaagggaggcagagagaaaaaatgcaatgtgacagggaagatggcacctctcctgatgcccagcacacagagggtacccaggaaatatggggcttagaatctcaacacctgaaagagcagcttctgctgcagcccctgccacaggcgccacactggccacagtgctccctcctagcccttcttcccctggccaaagctacctctggaaactgagttcgaagtttccaaaccttatcccagaccccatagccatgagttataataggcacataattaataatcacgtaattataatgtctatattatttataatttgtatatttatatataatttatttaactgcatctataatctataatttaaaattacatcaggtaagtaattacttacctactatagtgcttctgccacttacaagctgtgtgactttggataagtgccctaacctctctgtgcctctgctgcctcctctatgagttaaaatgtgtagactgcttctcagaacagggcccaacacatgtctggtaggtgtgggaattagccccgaggatgctgatgacaaagcatttctgtatctgttttgctcatgggttctttgctcaaccctgcaaggtgggcatttaatcactatccctattttatgggtgaggaagcggaagcccagcaagttggggtgactcacctgaggtcacacagcgagtcagcagtgggcgtcaggtactcggtgttctttccaaagactcctgaggccctggtctggaaaaagccagctctggaccaggccggaacacaggggcctttctgaaccttcctttcaggggcctggggccgcaggggcctccggcccgtcagccaagtcttttcctcccaacatgccagccagggaacacagacagccggaccccgctctggccactgccccgccaggcccctgtgccaggacagcgtgtccgcccacccgggcagtgaccagctgttcctgaggctgtgggctggagccaggtttctgtcacttcaaggagctcctgtcttcccggccgcacctccacagccagcaaggaccagtcagggattttcctgaactttccctctgttataaaagagtatataaacatttaccttttaaaagtaacagctaacttagttgcgccctcctctgcccagcattggtctggcagctgcatgtacgttgtctcctggcatctgcgcaccatcgtctgaggtgcataatcttgtgcctgtttgcagatgaggaaactgaggcacagggaacttgagttgcctgcccaagcccccacagcaaggcagtgtctgggtggggatttggacctagacagggagcctccctaccaatcaggccttcagggcagagtcttggggcccagaaaagcccagcccagcttctggttttaaattttataacgtgttcctttgttcagatgattgaaggaaagcatattgcaggtagaaatagaatgaaaacattgtaacacatgaaaccaggagtgcctttgtgtgcagctgacccttgaacaatgtgggggttagggacgctgacccccacacagctgaaaattcatgtgtaattttttttttttttttttttgagacagggtcttgctctattgcctgagttggagtgcggtggcacaatctctgctcactgcagcctggacctcccaggctcaggtgatcctcccagctcagcctcccaagtagctgagactacaggcatgcatcaccatgcccagctaatttttgtatttttagtagaaatggggtctcatcatgtcacccaggctagtcacaaactcctgggctcatgcagtctgcccgcctccacctcccaaagtgctggaattataggtgtgagccaccatgcctggcctcatgtgtaactttcgactccccagtcaattaacacacattttgcatgttatatgtattatttactgtagtcttacaatacagtaaactaaagaaaagaaaatgttattaaaatcctaaggaggagacaatcgaatctatttactagtcatgaagtaaaagcggatcatcgtgaaggtcttcatcctcgccgtctttgtattgagtagactggggccaggagaaagggagggtcttgctgtctcgggtggtggagggggaggcaggagaggcaggcacactcggtgtaaccttttgaaaaaactatcttgggatcttggctcagttattccgatgctgagtatgctaatcacatctaattttcattgattctgagaaaaacatccacatataagtagactgtgttgttcaagggtcagtcatacctggccctggcagcagcaggtccccacacagcttagcgcttgagccagtcctggctgctgcgtcccccaaagctgtgtacccactgaggaggacgcagcctgtacaggaattcaggtttggttctccttcccctcttgggggctgtttcctcatccgtaaaatgggaggctgatccctatcttgcgcattgcaggacgcaggggagctgactcctcttggcagctgggtcttgtcccatcctactgagggggaaactgaggtcaacccaccagcctagagtcaaacagctggaaagtggcagtgccagatttgagcctgaaaccaggttattttttcagtcaccttgcctagccattcatagaagtttttaaatcttttaggagttatcacatgctcatggtagaaaaattcaaatgcaatttcctttttatacaaatgttttgtacacacttttttttttgagacaaagtctcactctgttgcccaggctggagtccagtggcgcgatctcagcttactgcagcctccacctcctgagttccagcgattcttgtgcctcagcctcctgagtagctgggattacaggtgtgtatcaccatgcccagttaatttttgtatttttatacagatggagttccaccatgttggccatcctggcctcaagtgatcatcccaccttggcctcccaaagtgctgggattataggcatgagccaccgtgcctggctcactttttttttttttttttttttttttttgagagagggtcttgctctgtcgcccagactgtgcagtggtgcagtcacagctcactgcagcctgacttcatgggctcaagcaatcctcctacctcagcttcccaagtagctgggaccgcaggcaaacaccacctcacctgcctagttcattttttttcttgtagaggtaggatctccccatgttacccaggctggtctcaaactcctatgctcaagcaatcctcctgccttagcctcccaaagtgctggcattacagtgtgagccactgcacccggccctgtacacactttctacactgcactttttttcaccaacttgaagactgctccaattaatccatgtggtgcttccattctctgagtactcagccaatagaacctcccagatgtatctccctcatcccccttggatggacagctaggggatcccgtgttttgctgctgcaaaggacattgcagttggtagccttgtgcagatgacttcgggcccaggttagagggcacatgtaatttgcatttgggtccatattgccagaaagctctccaaagaggtagtaccattttaccctcccatccccaactagattgggcacctctttccccatgccctcaccagctaggcagatgctctgtgccaagaaaaccaaacagctgcttcccttacaaatactcaagggcctgggcatgtgtgggggcctgagtccagcctgcacccgttaccaactgcaagatctcaggcaataggcttcaccccgtggggctcagtttcctcatctgtaaaacagtggtgattggattatggtgagaagtttgtagatgcaaatgcctaggacagtgcctggaacatcgaggccccaggtcagaagtggctgttcttacgagtctgcatgagtcttgtaccccatgactgcagtcatggggatgggggcccagcccctaggatggatgctcaggcctcagacctgtgttttgggaagggatgaagggaagggaagagcaatgtggggaattaccaaggggaaagggtgggattagcttatcccagcttcccactgtgccagtggggaaactgaggcccagaggggcccaggccttgaagtgattgcaagttcagcagcatgaaactgctctttatccgtgcactgctgtcaggaacaaatgctgaatggagagtccggagggttgcccaggccactgcaggacccaagctctgagactgagggcttggggacacagagccagagccttgtcctgaaatcctggagggtgctccttggacaggacaaaacttgtattctctctctgagcccagcctcagcagaacccagagtcttccagggctgagatcttgccgtaccagctgcggtcacagacctgccacactggcttgacctgggagttccttacagctgcagaacccctgtcccacctgacccgctgcatcaaaatctgcgtctcaccaggatgtacactttaatgtttgaggagcactgagactcagccaggatgatactctacctgcctgcaggtacaggccgctgctctatgggcagacctcaaccctcagccccagaatgtcctccccagctctgtcgcagacatacgtggctccctgggaggcatagaaagtacaagacttggacctggctccccatgaactggtggccctggaagttgctaccttttattgagcccctgccagctaccaagcacattatcccatttcgtcccacaacagcactgaaagtttgctgtttaatttagagtatcttgcagcttaggcacacaaagcacagagaggttaagtaaactgcccaaggtcacccagcatatacatatgcaggagctgggatatgaatccagagctgaccccggcaccagagtctagccatttacaatcagagtgggcatgggggcagatggtggctcctctcacccctgaaaccggagccccagcccctatgagccctcacagttcattggtctggctgtggtgaatctgacctctcaaaagcctccctttccggagcagaggcctgcgattctccatgctggagagcccgccaagagggattctcctacaactttccagaacacagcagttctggggccaggccaagctagctatgtacagctggaagaggctctctcccccagatgctgagtgactagaagccaagagggagggagttctggaatggtctgcagcagctggaggtgaggcctgagggggctggggcggggcctgggaagaggggccagtgcacagagtattctgaaccgcagaaagtattctgttcactctgggagaaaaacaagagtgttgttcaaaacagctggacgccaggcccagttgccctcgcctggtttttactcttaaacaccttcgcatttcatggctgttccaaagagagagaaatcagccagttgtccattcagacacaagacaaggcatcagccgacaaccaaaggcaaatattttccgtggtgaggaaagcctcccgggtggccccaggcctgcctctggagcagtggctggctggtggctggctctccccgaaggtcgctgcttctggtcagcagactgcgtgtctgggggactggccaggatccgcacccacccagggagcgctgggggcagcggggcggccatcctaggcccgtagtaaatggaagctcccttcctggcatgagagcagccaggcctccagggaggccaggacagcgtgggccccacagttccctgtcttgaaaccccagcccttgatatcaaaatgggacctgttagtctgttgtcggggagggggatttaactgcccaaagctcttaggccctgagtgaatttttttcagcacaacagtagctacacacagttgaagagtgtggcacatggctacatagggtttgtatttggtctacagatgaaggaacaagacccatgtggacttaggcctcattatcataattctgcagccccaggagccaaatccccacatggaaacccttagtaggtagcctggccaagtgggtagcgggaaatcagtgatggtaggccctgggacttctctctagtcccctccccaccctttttttttttttttttttttaatagacggagtctcgcccttgcccaggctggagtgcagtggcgcgatcttggctcactgcaggctccgccccccggggttcacgccattctcctgcctcagcctcctgcatagctgggactgcaggcacccgccacctcgcccggctaattttttgtatttttagtagagacggggtttcaccgtgttagccaggatggtctcgatctcctgacctcatgatccgcctgcctcggcctcccaaagtgctcggattacaggagtgagccactccacccaggcttttttttaagacaagagttttactcttgtccccaggctggagtgcaatggcgcaatcttggctcactgcaacctccgcctcccaggttcaagcaattctcatgcctcagcctcccgagtagctggaattacaggcgcatgctaccatgtcaagttaatttttatatttttagtagagacggggtttcaacatgtttgccaggctggtctcaaactcctgacttcaagtgatccacccaccttggcctcccaaagtgctaggattacaggcgtgaggcatcgcacccggccacccaccctttttttctcccaagaaaaccagttttctgaaattttcagggggaaccaggacctcctcgcccatgtctttcacccctgggtgcctgtatcctgtattcaccaaagccccacgggcatctccccgattgaggtcccacccctcagggcctaggacagggggaccagggagggcccccagaggctggagtttggaatacccccttctcttctctggagctcagtttgcatgtctgtgaaatgacaggtgatgtcacctcccagaagggcagtttgagagaagtaaaatctattgaggcaccttggacacaggagggggtcagacggcatcagcctttgagggtgctgcagttacacggctccagcagtctgagccttatcaagacctttccagatatgagggaagtccatgcccagtgtctagctggctgggggagaagccccttgagaacccccactctgtaatgctaggctctgcatttgcttaggaggctgtgtccctgtctctccccttctgggccagccttgctttctgggcaggcccaggagtgtcccgggcccagcactcagagtcagcgctgtctttaatctgtattccacaggcatcctcaccccctcccctcccaggagctaggaacctgccaggcttcttacctctctgctggaatctccaccccccaccagaggctgccctcttggggaaggggcccagcccttgaggcctgtctcctccagactagctaaaccacagagagaactccatctcaggttcccaaataggcggtattcttccccgccaccaagctaggcagctcctggcggctggaatgccctgctcctttctcagcccaccacttcctccaaccttccgtcctctgtgctgcagcagggagtcttaccccacctccttcaggagggaggtgctcacgggttcctatgcctgtgggtctccaggattgggcacggagcagtctgcaaaatgtcaagtgagggagagatccagtcaaagccccaggggggcctctgagctcagtcagctcctctgctgctccccacctcttgggggaaggacaggctggggtttgcatgggtggccttttggagagcagagtaatgggagcctacttgaacttcctgcggcctcattccctgactgggggcggagggtagtctgagctgctggcctggggtgcttggccgcaggggaaggggctgggagggaggggtctgggtgagtctaagggagggtgagcctgaaaaggggacggcagcactaaactgccttcggggagtccccactgtgcgcccctggcactttcccagtcccctggcgcggtcgcaggcacgggtggggtctgcctcaaagttgttggtacggccagcccgctgctgtttaaatggtgtgtttgtttagagcggcttagggagggaactggaaatggggggcgggggcagcgccccacttggcgccaccgctgccggagggtctgcgtgttagaagccccagcttcgtaaatgaccgaagaagggtgggcgttgaggagggaaggccgaaaaccaacggagggctcggggccccgggccggccgccccctttttgcggggggagagcaggagccgcctctcgcagccactctgcgcgcggggtgggagggagagagggaggcgaagggacgacagcgccgggctccccgcccccatcccacccggttccaatatttcgcagaaaggcacgcggctcctaatcggtcttttccaggctgagatttagccgtgcgatgcccgcgcaggggcgggggccgcgggccaggggaggcgctcagagtccggagccgccgagcgaggtgaggagcccgcgtcctcggctggtggagcgggcgggcgggcgcgcaaacccgagaggcagatatagaaaggggggcaggttaaaaataaccctctccggctgggaagctcgcgcgcgctctctcgcctcgttcggtgccagaggactccaggggaggtggcgttggggagggcagagcgggattccccctcctccgccgggcggggtgcccgcctgcgcgccgcggttgcacgtgtgcggggccgcgcgcccgggccccctctgcacccggtcggtgggtgccccctccccaggaccgggcgcatctggcagtggccccccgcccgcagccttgcgcggctggagggaagcgctccattattcattatttacgagcgttaataggtttgagccacgggggcggggggttgggggggcgacgaggacccagtggggaccgaagcattagaagaagggatagggagggagggggaagggcgggggcggggctgtgccgcggcctggaggaagaggtctcggcctggggcccggcgagccgggcgcacctctccgtcaggtttctccacaccgccggccgtcgaggctgctcagggcgccaagagggcagcacgggccttagattttgctctcggcctctgtccttcgcgtcctcgcccttaccgaggcgtggggagggagctgcggaggccgtacgccccgccctgcgcgccccttgccgccgccgcgtccccgcggcagccccggcctcatttatcatcatctttggtcaagtggagtgtgcaaggaacagctgcttcactcggctgacttcgagggcggctacgggagaatcagggagatgaatgatgggggctggtggcagccccccgcggtccccgcgcaggcgagagggaggcggggacgtccagggccgcctccgcctcatggcgagtgcagcgcccccttcctctctcctggcgcctgcagcgaccggggaccgggggaccggggcaccgaggaccgggcccgccccgggaggggactgggcgcggggacgggggggcgcccttcgccggcggagaactggcgggcgcgctgccggcagagcccgaggttgccgtgaccttgctggggtcagcgggctgggctgcggaggcggcggcgcggcgtctttggtgcgctttccggattggcgcagaggccgggaaacaaggcgggggcgggcgggggaacacaaatagaaggtgaaattttacctgcccctgagggagtcctgcggattttctccggcagcagcaggcgctctgcctttgtcttacacggctgaaacatctgttgcagaggggcggagaggccgcaacaacccccacacaccctgcgctgctccccgtccccctctgccccagccgggctgcaggactccaggcgccgcgttaaccctgctcgcgctggggcgcgcgcccgcactcgctgccgcagtccagcgcctcgcgtggggctcctcgcccccgccccggatctggtcctggccggggcgcccggtgacccccctccacctcgatggggtgctgaggtgtaggcggggggcgggggcggaaagggttaatggcctagtcgcagaccctaattgtcagagccggccccgcttcgtttcaattaccctaagtagagactgaatgcgcaattaacgaagtcagcttgccaactggaaagccggccccgctttcacgttgagcagaatactccaccagctgacttggacgaagcaatttcctcctctctctctccccttttttctctccttctctcttccaatccccctccctctttttctctctccttaataataaaattataccaagcagtttgcggtgtggcaggcggccagaaaagcgtttctttaaacgccgccgtctcacaattaggcagcaagaggatttgacacgccgtggcggcctgacaggcggcttcctcccctggggactggggggagggagggggtgccaattccccgctcccccaggtggaacggggactgggaggggctggcctgctgtgcctccccggctgtcagaatggctgcagcgagggggtgtcaaaggcagggaagcgaggggcggttccgcctaggctggggaaggcggaaggcagcggcacattccacgactcctctgggaagctggcgtatccaggagggagaccttgttcccctttctgtttgacagacaggcactctggggcatagagctgtagacggatctcagccctgctgggcgtcctgcacaagccactggcccactctgggcttcttccattaatccctcggcaaaatgagggggagatttgacctagaatgtgctctgcaaaaagtgtcttcccgtggctcgttgcccttaacagctggtcttgtaggccaggagagggggggtgtaggcagcaccacgtagaagcaagccggagacccctatgccgtttgggtggcagacccatgggcctcaaggcacacaggagggtggctcggcggggagccatgatgcaggcagctaatagatggggtgactttgcaggattgccagggattggtgccatgaggacagaggatactgaacactagctgcagcagccgggccacttgagctcggggaaggcccagagaatttggcagaggtgggaggtaactgcaggggtccccatttgctctttgcagccccccagtcccacccaggctgctgcttacatggggtgccttcatccttccccacatagttaagcccttcttccagccttccctgatcacctcctctccccacccccatgggcccctgggtgtcactacatctcaacaccaccagggcagttgtatgtgtgtctgcctgcctctggagagcaagggccatgtgctgtttcctgtgtgtctccggcacccagctcggcccacatccagactgtaagctgagcagaaatgtgctccacaggtgaaccagtgcaggcactaggggctctggaggagacagcacacactttgtctctccttcctgattggctgttgcatgcatcctggcctccaggcccctcatcctcaaacctgtctctgggtatcatccctttggtctgtgttgggggttaaatgcactcaacacagaacccagcaccccaatccatctcatctgtttatttatccaagtaatactgaagggacatcgactctggggccagtttctgggtttggagcttagggtcaaacagaggaagtctctgccctcctcaggctacgttctagtgagggaggcacatgtgaaacagctcattgtaccatcaattatgtaattaccgctgccatgagagccaccaaggagcctggcgggggacccaggagagttggggtggcgcctcgcccggtgtctggtgtggaatgccacagaggttctcaccgcctctggaagcctccagcctttccagtccccctcctctctgcacctcctttccaaggccgctgagtgcacctcctgcacgggtctgccctgcctcccccctgagcccagggcactcgcctttctgctctcctgcgttgctctgcttatctgtgctggtcccagagcttctgctgggcccgtgagcactgttcctcctgctctgggtgccatcgagcccatgcagatcccctttgcatcggttctgtcagcatttgaccccaggagcttgtgatcaaattcaggccacagacagtgtctcttgaattctcaagtatgaaagaaaaaactttgtacttggttgataatattttcttaaatgagagctgtccctttttgtaaaatcctgatttctgtctttttcaagggaaaagctcagaagctttggcaccctggcctcccactcccaagtggccgcagtccgctggtgctgagaggggctgctgctgcccctccccccccactttatttgggagcaggatcgccagtttgtctccatacccacctgcccacttccctgccaggcctcgggaagatgttctttgtcaaatgaagcaaagcagtggccacccctgatctcccgctgcctggcccacccacatgtgctctgtgtcgccactccactgctctttctggatattttcacagagttactgtgacattttgtgcattattgattcagtaaatatttattgttctggacaatggggagtagctgtgaacaaaacaggcagaaatccttgctctcatggaacttttgttctaaagaggagaccaataataaagcaagtcaagtttgattacaacaaggtcagtcgtgggggtgcaaggggtgctgtttcaaacagtggtcagggaaggcttattgagaaggtgacagaggtgacagaggagccaagacttggagccagggtagaagctgtgtagttatctgggagtggtatttccagaggtaaaaggcttgcccaaggtcacacagtcagccagcagtcagacaaacctgcagacacttgacacctctgtgtttccacttccccagggaagtaagtcatggaccctctgggcatgtggggtagggaggacaaggctggggccagacagtcctgtgccttcccttagcagccaggccaggagtggtggctcacgcctgtaatcccagcactttgggaggctgaggtgggcggatcacctgaggtcgggagctcgagaccagcctgaccaatatggagaaaccctgtctctactaaaaatacaaaattagctgggcgttgtggcacatgcctgtaatcccagctacccgggaggcggaggttgtggtgagcccagatcgcgccattacactctagcctaggcaacaggagggaaactctgtctcaaaaaaacaaacaaacaaacaaaaaaactagcagtcacacctagcctatctcatccttatcatgcagcctcctacaagggcaggcactcctggggcttggggtggggagaatggagctggctgggagcacctctgtgggtcccatctgacccctgtgccagggtctgggccagccccttggtcttgctaggcccaggactgattgtgtctgatggcatcagcctggcctcgtgggggaaggacaggggctgtgtcccccagcaggacccagacaactgcctgggccaccagacccttgccctgttaactgtctgcgacccagcaatcagcaccccccaccctttttcccttttcttcattttgacagagacacagagaggtggtgacgctttttgttcagtggtgaataaagtgatctaaaaaaaaaattattgtccacaagagactgatcagtacagaactgataataggtgagctcctcccggcagccttccctggggggcctaggaatgcctgcagctgctgtggaatcccatgttgctcccccacacctcacagtggaggtgggactgctggccatctgcccctcgtccctggactgtgggccctgcggcccaggtctcccggcctcttgatagctgtatcccaggaatcggcaccaaggatcggtggggtgggagtggagagcagggcacagctttagagttaggggacctgggcacctaggcagggggcctggctgtgcccatgaacagcaggtggggccaggccagcgggtgggcgtggttaggccctgcagggatcccattcagctggcttagcaggtctcagctgtccccacagctgggtccctggaggagatggtgttgggggctgtgaggggaggctcctcaaacatctggagagtccagatacctctgcactctgaagggcccagagcccccagccacaccagggctcccccaacctcaactgagcctggctagggctgcccttctgcttctcaccccatcactggcatcctgatatttgggacccccagaccctatagagagggtatgttggtcaccccgtgggattcttccttgagcatgggggggccatgaatgaggagggatgcatatccaagcgttgcccacagggagtggtctggaggggctgcctggtcctctggggttcctgatgtcctaggagggtcctccatctgcccgaagcaggcctctcagcccgtggaccctaacctgtcccagaagcctatgggcacccaacctcttgtcttgtgggctccttggaaactcgcccccttcctcccattcaagccaggcccctaggatatggaattgagcccatacgatagcagtgaatctggcgaacgatttctcattttcaccaagtctcctgtattgattattcatcacccacaacagatggggaggcctgaggagttccaccttctccacccctgcctggactcctcctctgccctgtcctcagcttctggagccctggtacactgctccttcattctcaggttcccaggccttgagtgggttgggtttttaaatttttttcttgcagctacaaatcatgaaaacaggtcataaaaccaccttgggtaagtaggtgggatggaaccagtggcctcagagctgctgctggggatcaggaagcccccagtccgtttctttctccctctctccctgcctcccctcagcctccctctctccctttctcttaggaaaaaattccagccaccacctcccagctgggctccctcaggagccacagcagctctggcctacactgtgcccatttcgctgactggggcctcaagcctggggtctgaggaggctttaggcctagtgacctctccctgaggctgcccaggggacagtagttgccttggtgacagtgggtggctggtgaccatcactgcccattagtggacccacccgaggtgggtctggctgcttaaagatgaggacagaataaaaaagtgaggaccctggcctgaggctcaggctgtcacaggctgcagctcagccccttgccccacagcagctttggcttgcatcctgctccaagagactgttcctccaaagtgggagcccctcacgggggctcaggacaggggtgtccacccgtggtccagtcactgccgctgctgctgagggcgtcctgcataggagcttccctgcgggtgggctctgctctggggtcctaagcagggcacttgtcctgaacctcacttttttctgtaaagggggaggagagattaatcaaaccgttgttcaagaaagccgcacagagtaggtgttctgcagccgccttgctcccgcctcagcagtcctatagatttctggagggaaagggctgaggtctttgcctaaaagaagggctgtgccccaggtgtgtgccacactgccgaaggcctgtgagagccgctggccttgcaccgtagggtagctggggtttcgttgtgcccccactatgttcatggcttggagtgaggacacccattgctgtgtcaaggggaatcctgatgccctgggtgctatgtgattccagctcatgctccctgctgtgcctggcctgcctcctctgtccagcgctgagaagactaagttccaggatctgattctaagggtgaagtgttcatgtatctggtgcttagaggatgcactagactccgctcctcctgccttctagtttcagcaagaactttggagataaggcctggaccaagtgtctgagaggagaggcaggttggggagaaacggatggatgggaatgagtggggaccgtccgggcagtgtggttgagctggaccatgaggagtgagcccagtgggtggggggtgccctcccttgtcccctctcaccaccccttctccctccagcccaagccacaggccaaacccacaatctgcctgctaggccacttcttccctgcccccaggttcaaaggtcaccatcgttctgccggggccagggaggggggtgctctttctgccccctcctctcctgaggcctgcccagcccaacccaacccagcccagccctgctgcctgcctcgccttctgtgtcctgtcctagtgctcttgaaaagtaatcataatcataataattaataacaacagagcccatagcaggcctgaggcagcccttaaagaggcagtgcccccttttctcccagcagagctggcagtgggacctggctggcactgagaggcggcctgtgcctttgttcccatccctccctttgccttgggttccagggtggtgttggggcgagcatttttgcctgcattctccatcagcactgggcttctcgtgttttaattgaactgtcttttcttagcaatagatgctttcaccgcatccagctgctcgtgtgtattgggaaacctgcctgtaatacagctcggctaaattaaaagacacagcagctggaccaattaaacagggagggaggaatgcagacggacaggcagggagggggtactggtaatagcaccccctcactgtctctgtctctctttaaataatgtttctggtaatgcattttggagaatgtgaaaaaaaataaaaaataaagccgtagaaatgttaatgatatccacaggacactcagcaggaaatgagagtgatctgggactaataaaagccgaaatgtaatttgtgcagatatacgaggcgcagccttcagagtggtcctgggtttgcacattctgggctcataaacatgcgcctggggagggcagggagcgggcgctgtgccctcggcctgggcacaggcccgcctgggctgccctgtggcagtctggccagggcaggagcgtgaggctgcccacctggcagggagctgccagaccagaaccaagtgccgtccccagctcctctgggttggcgcgtcgcagcaggaacctcctgtaatgttttatccaagctgccaggggtaggattgaagtgggtcagaagggtgggcacgctgcttgttagggatgcctgcgacaaatccagggagaggagctggagcagagggaaagcggctttgataagccggtgggcaggggctcgcctcgtgggaaagtggccggcccccacactgggctgactctcctgcatttgtgggccagggcaagctgactccagagagcaggagaggtggtcccaggactgggctgacgggcttctgggggccatctggctgccctgggcttgccctgctctcaggcagatggaggccctctgtcgccttccctgcatccatccccagacactaaatgaggaaggcacttgtggtggggtccgggccaaggaagaagggtaaatggagcagcacccccagctctcccccactccccacctttctgcctcttccctgtgcccctccccgactctgcgtgcctctccctctctgtgcccctctccccctctctttgtcccttcctgaccccttcaacaacctggaatctttgtagcctgaggcaagccaccccttccttttggagcatttgggaaccagcactggaaagtcccctatcccctcctgggggcctgggccacacaggccgagctgagcccctttcttcctgcctccgggccagcatggttctgggtaaatcccaaaccctctgggactcggccaatggccagcccctccatgcacttcctccaaaacctggggcattcctctttcttccatccctctttgaggggtcttctggttggccaggccagcgagtcagctggaggaacctttaccctggatgctgggctgtcagatgctctgctctgagaggctcccgcaacccaccctgggtcctttcctgacccaggattctgctctgcaggcaggggcaggttagacccctgcctgagccccatcccctaaaatcataaccagatgggctcttgagtgttgcctgccccagccctcacctgctgaggtggggaggaactggccaggaggggacagggctgtgtcgccccatgtgggtggggctgggctgtgcccttccgtggccgtggccctgggactgcatctctactcccattagtatgcactccctcactctgggccacgtaatctgtttatgcacgtatgatatcaaaaacaggaggcaggtgctgccgtcttgcgttcctgggagtcagaggaggggacattttatgtctacagtggcttggcagcccctaatcgatgtctgctagaaggaacagacagattccagatggcgtggcagtgatagaggaggtgtgtgtgtgcatgcgtgtgtgtgtgtgtgcgcgcgtgtgtgtgtgagcatacatatgcttgtgtgcacgcatgtgcgtggggacaggggcagaccctcctcagtccccagcatggctgggtcatgcttgaacacggtcgcgaagggactaaattacaggatccagcaggccccaggggatgagggagcgggaattgctctgctaaatgcttttgagctgtcaggaagggctgggagtgatgggtgggggacattggggaggagctggcaatgggcggggggggggcgggtagctccccagtgacctggcgctgggcagccggttttgcctcccgcatcagtggccgtccttggcaagactcagctgcaggcgatgtgggagcgggaattacagagcacacctccctgacacagaagttgtcaatatgcgcacagctggtggggaggctcaggcgaaggggggactattaagagctgcgcgggggagcaggcagggtggggaggtgggtgggagggtgctttctgaggcaaaaggaagtggcccgtctgaatcgctcatcctctgccccctccctgcccatcctcccctccctccttccctccctccctcccttcctttttcttttcacagataaccagcccgagtcatgcagtcttttcgagaaaggtgtggtttccatggcaaacaacagaactaccagcagacctcgcaggaaacatcacgcctagagaattacaggcagccgagtcaggccgggctaagctgcgaccggcagcggctgctcgccaaggactattataacccgcagccttacccgagctatgagggtggcgctggcacgccctctggcactgcagccgcggtggccgccgacaagtaccaccgaggcagcaaggccctgcccacacagcaaggcctgcaggggaggccggctttccctggctacggcgtccaggacagcagcccctacccaggccgctatgctggtgaggagagccttcaggcttggggggccccacagccaccacccccacagccgcagccactacctgcaggggtggccaagtatgatgagaacttgatgaaaaagacagcagtgccccccagcaggcagtatgcagagcagggcgcccaggtgccctttcggactcactccctgcacgtccagcagccaccgccgccccagcagcccctggcataccccaagctccaaaggcagaagctgcagaacgacattgcctcccctctgcccttcccccagggtacccactttcctcagcattcccagtccttccccacctcctccacctactcctcctctgtccagggtggtgggcagggggcccactcctataagagttgcacagcaccgactgcccagccccatgacaggccgctgactgccagctccagcctggccccggggcagcgggtccagaatcttcatgcctaccagtcgggccgcctcagctatgaccagcagcagcagcagcagcagcagcagcagcagcagcagcaagcccttcagagccggcaccatgcccaggaaaccctccattaccaaaacctcgccaagtatcagcactacgggcagcaaggccagggctactgccagccggacgcagccgtccggaccccagagcagtactaccagaccttcagccccagctccagccactcacccgcccgctccgtgggccgctcaccttcctacagttccacaccgtcgccgctgatgccaaacctggagaactttccctacagccagcagccgctcagcaccggggccttccccgcagggatcactgaccacagccacttcatgcccctgctcaatccctccccaacggatgccaccagctctgtggacacccaggctggcaactgcaagccccttcagaaggacaagctccctgagaacctgctgtcggatctcagcctgcagagcctcacggcgctgacctcacaggtggagaacatctccaacaccgtccagcagctgctgctctccaaggctgctgtgccgcagaagaaaggtgtcaagaacctcgtgtccaggaccccagagcagcataaaagccagcactgcagccccgaagggagcggctactcagccgagcccgcaggcacaccgctgtcagagccgccgagcagcacgccacagtccacgcatgcggagccgcaggaggccgactacctgagcggctccgaggacccactggagcgcagcttcctctactgcaaccaggcccgtggcagccctgccagggtcaacagcaactcgaaggccaagcccgagtccgtgtccacctgttctgtgacctctcctgacgacatgtccaccaaatctgacgactccttccagagcctacacggcagtctgccgctcgacagcttctccaagttcgtggcgggtgagcgggactgtccgcggctgctgctcagcgccctggcacaggaggacctggcctccgagatcctggggctgcaggaagccatcggtgagaaggccgacaaagcttgggctgaagcacccagcctggtcaaggacagcagcaagccacccttctcgctggagaaccacagcgcctgcctggactctgtggccaagagtgcgtggccccggcctggggagccggaggccctgcccgactccttgcagctggacaagggcggcaatgccaaggacttcagcccagggctgtttgaagacccttccgtggccttcgctacgcctgaccccaaaaagacaactggtcctctctcctttggtaccaagcccacccttggggttcctgctccagaccccactacagcagcttttgactgtttcccggacacaaccgctgccagctcagcggacagcgccaacccctttgcctggccagaggaaaacctgggggatgcttgtcccaggtggggattgcaccctggcgagcttaccaagggcctggagcagggtgggaaggcctcagatggcatcagcaaaggggacacccatgaggcttcggcctgcctgggcttccaggaggaggacccccctggggagaaggtggcctcgttgcccggggacttcaagcaggaggaggtgggtggggtgaaggaggaggcaggtgggctgctgcagtgccccgaggtggccaaggctgaccggtggctggaggacagccggcactgctgttccaccgccgacttcggggacctcccactgctgccacccaccagcaggaaggaggacctggaagctgaggaggagtactcctccctatgtgagctcctgggcagccccgagcagaggcctggcatgcaggacccgctgtcacccaaggccccactcatctgcaccaaggaggaggtggaggaggtgctggactccaaggccggctggggctctccgtgccacctctcaggggagtccgtcatcctgctgggccctacagtgggcaccgagtcaaaggtccagagctggtttgagtcctctctgtcacacatgaagccaggtgaagaggggcctgatggggagcgagctccaggggattccaccacctcggacgcctctctggcccagaagcccaacaagcctgctgtgcccgaggcgcccatcgcaaagaaagagcctgtgccacggggcaaaagcttacggagccgtcgggtgcaccgggggctgcccgaggccgaggactccccatgcagggcaccagtgctgcccaaagacctcttgctccctgaatcctgcacagggcccccccagggacagatggaaggggctggagccccaggccggggggcctcggaagggctccccaggatgtgtactcgttctctcacggccctgagtgagccccgcacgcccggacccccaggcctgaccaccacccctgcacccccagacaaactggggggcaagcagcgagccgccttcaagtcgggcaagcgggtggggaagccctcacccaaggctgcctccagccccagcaacccggccgccctgcctgtggcctccgacagcagcccgatgggctccaagaccaaggagacagactcacccagcacgcctggcaaggaccagcgctccatgatccttcggtcacgcaccaaaacccaggagatcttccactccaagcggcggaggccctctgagggccggctccccaactgccgtgccaccaagaagctcctcgacaacagccacttgcccgccacattcaaggtctccagcagcccccagaaggagggcagggtgagccagcgggcaagggtccccaaacctggtgcaggcagcaagctctctgaccggcccctccatgcgctcaaaaggaagtcggccttcatggcgccggtccccaccaagaagcggaacctggtcttgcggagccgcagcagcagcagcagcaacgccagtggcaatgggggagatgggaaggaggagaggcctgagggttcccccaccctcttcaagaggatgtcttctcccaagaaagccaagcccaccaagggcaatggcgagcctgccacaaagctcccacccccggagacccccgatgcctgcctcaagctcgcctctcgggcagccttccagggggccatgaagaccaaggtgctgccaccccggaagggccggggcctgaagctggaagccatcgtgcagaagatcacctcgcccagcctcaagaagttcgcatgtaaagcgccaggggcctctcctggtaatcctctgagcccatccctttccgacaaagaccgtgggctcaagggtgctgggggcagcccagtgggggtggaagaaggcctggtaaatgtgggcaccgggcagaagctcccaacttctggggctgatccgttatgcagaaatccaaccaacagatccttaaaaggcaaactcatgaacagtaagaaactgtcttctactgactgtttcaaaaccgaggccttcacatccccggaggccctgcagcctggggggactgccctggcgcctaagaagaggagccggaaaggccgggcaggggcccatggactctccaaaggcccgctggagaagcggccctatcttggcccggctctgctcctgactccccgagacagggccagtggcacacaaggggccagtgaggacaactctggtggaggaggcaagaagccaaagatggaggagctgggcctggcctcccagcccccggagggcaggccctgccagccccagacaagggcacagaaacagccaggccacaccaactacagcagctattccaagcggaagcgcctcactcggggccgggccaagaacaccacctcttcaccctgtaaggggcgtgccaagcgacgacgacagcagcaggtgctgcccctggatcccgcagagcctgaaatccgcctcaagtacatttcctcttgcaagcggctgaggtcagacagccggacccccgccttctcacccttcgtgcgggtggagaagcgagacgcgttcaccaccatatgcactgttgtcaactcccctggagatgcgcccaagccccacaggaagccttcctcctctgcctcctcttcctcatcctcgtcctcgttctccttggatgcagccggggcctccctggccacactccctggaggctccatcctgcagccgcggccctccttgcccctctcctccacgatgcacttggggcctgtggtttccaaggccctgagtacctcttgccttgtttgctgcctctgccaaaacccggccaacttcaaggaccttggggacctctgtgggccctactaccctgaacactgcctccccaaaaagaagccaaaactcaaggagaaggtgcggccagaaggcacctgtgaggaggcctcgctgccgcttgagagaacactcaaaggtcccgagtgtgcagctgccgccactgccgggaagccccccaggcctgacggcccagctgacccggccaagcagggcccactgcgcaccagtgcccggggcctgtcccggaggctgcagagctgctactgctgtgatggccgggaggatgggggcgaggaggcagccccagccgacaagggtcgcaaacatgagtgcagcaaggaggctccggcagagcccggcggggaggcccaggagcactgggtgcatgaggcctgtgccgtgtggaccggcggcgtctacctggtggccgggaagctctttgggctgcaggaggccatgaaggtggccgtggacatggtaagaggccagcccagccagggtggggagtgtggggttccaaaggacaggcaggcaggcagtcggggagccccttgtttctagtgctacagtgtgggccaaatgtgtctgcagtctcgggacaatctgcagagtcctgagcctctctggggtgtgtgggggaagtggaggcacccatctggctaaggcaggtcacactcacctaccctgtcccaggagacttcccgccggggcccgtatgcccagccaccgccactctcccactcacctggcatcttcaggctccagccccacccagaatccactgggcccctccccatgctgtcaccggagatgccaaggcccagagaacacgaggactcccaagattgaacatcagggctgccccgggcggtgcaagagcaagttgcccaccctctgttcctgtctccattgcctctgggatgaagctaagggctcaggaagaccctctctggcgacacaggcttggtgcatggacccagtcacagggttcctccctctgcaggacagtccatggggtcacacagtcacaacaggcagggcggggcagatccagaccctctcaccattggctctgagaccagctttggaagccatagtcactgagcaccaacatgagagagggaactctggggctgtgccgccatgcacctttggggctgtgacctgccctctctgtgcctccgtcccctcgcccctaacgtgggtatgagggtgcccatggaggaggggtcgggagggttaaaaggtgggcacctctgagcccaccgagcacagcagccctgtgatagtcagtgcagaggggcctggtggctctggtgacagcagggtgacgttcttcgtggtgtcaccacttccccagtaccatagagtacctctgtgcccttctgagggaggggtcagtgggggcggtggggtgcacctctcccccggggccatgcttctgcccccacattcaaccccgactccactgcctcatccagacttccgtggagtgacgctcccggctctcagcgctgtgtggtggctctcagtggggacgcctgcagccttctctggcccctgccctgagtcccatcccctccactccttccttcaacccactatgtgcggctgaggtcacaggggagccagaggggcttggcaggggtctccagaggccctggacaaacactgcctgcatctgagtgattcagtgacccagcacagtggccccagccggtggcttcgcccctccccctgcccagcctcctcccccgtcgctgcactgcccacctgctcctcgcagtacacccctgcagcccctctgagcagcccctgctcctgacagttgccgtggcattgcctggccaaaccaaggtcccggtgggggcccactgtgtttgccacccacgcctcctagtgtgtgtcttgggcacctgcttcccactgcccatggggatggctggagaccttctccacgcccagacgccctgcccacctcactccaccctccacctcagaggaaggctggccccgacaggactcctgcaggttcctggtgccgcgggccttgcttacccagcagatggtggccttgggcctcttccctctccccttcccagttagtgattttttgcctctctcctgctttctgtctctctctgtctctctctctctctctctctctctctctctctctctctctctctctcattactggctccttcccagcgccttgaaacaggttcaagtctctcccgtcatcaaaaaataataaccctcagatcaccagccccagctggctgccacctcccctgcttcacagccccattcctgaaagccttgtccccacggcatcctcggtcccgcagcctcaccaggggctccccgacactcacgtcccaccaggctgagatcaggtcgtctccacatcccctgcagccagcactggccggccgaagggaggaggggtcagccccgagcaccgaccaccccatcctgtccctggcccatgggtgtcttaaccgcccatgcacacacaaggtcctgctggactgaggagacagtgtgtgttggagaggcgctagcttccctacaccacgcgggggctggaacttgccagcccagcccatgcctgtctgctgtgccatgctccagaaatggcctgacagcctgcgcaactagggctgccccgggaaggtcggaaccaggaacaccctgccagacagatgggacatcctgggagaatgggcagagtctggggcttcccagggtcacttttggctcaccaccccttcctgcctcagtggcttgggggcgccatgctccttggagtgagaccctggttcaaatcccagctctgccgagggctggttccatagctccaggcgagtcacgcatgctctgagaactccacaatgtcaaaccccgttagcaggattgtggggttctgtggatcatgtgggacctgcctggcatgtggaaggggcttggggtgcagctgtgtccctggccccagcactgccacacccctcggtaccttgacctcacttttgcgctctggagggcagaacctctgagccagctctcagggataccttttttcctcgatggccttttctgggaactgccctcgcctgctatctctgagccctgcctgcccttcccccaaagccatcatagacccctacctcctatccagatggagcctggccatggaatgcttggggtgagagggacccatagcgggctccgggcattgttagggggctaggtggtgtctgcagaggccccacctgtggcagggtttacatgccgccacccctgccctcctcttgggtagctggggtcagaagggcctgaggcctcactctctctgcatcttagtttcttcacatctaaaatgctattcatatgcctgcctgagggtggttggggcctccgtgcagtaagtggagagaagccttcagccagaggacccccatatgcttaaacatccagacaccaagggccactcacagacagcagccggcttgtgtttcgtcatcccttttgggtcaggaactggggacgctggactccagatctccaggaggccatcccagactaggcgggaaggaggcctcagccctgagctgaaaacctgaaattctagaataaaccccaggccccactcccagcatgggcagcggggaggggagtgttctgacatttctcagctgctgtggttgggatggtgcgcccaccctgagcatgtggggtcctgtgggcccctactccagcctggaggcagctgcaggggtcagagaccagcctggagccctcgggcaggttactcagcctcagctctcattggtaacccaggtaaaataacagtaatcccatcataaggttgctgtgggcatgaggcttccagccatgcctggcacataggaagctattgtcgtttgtttcactggcttcgcacttgggcagaggccgccgccctctctgctgccttctctacctcaccccccgcccccagcacggtggcactgtggctctggcgcctggtgacttctccctccccggcctcaggtttgcttcactcttccaagggccttcttggtgtgactgtcctgtcctggccacgtccactccaagcagctggtccaggtgtggggcagcccccaagctcagcagaggacagttttgagacttagaggaggacggcatcagatttacatgaagtcagccatctcaagggattaccacgtcaccgcctcctctcacaggtctgagagctggtcccctggagggtgcaggtctcatcctaggtagaacagtcccagcctagcttcaaagtgctcctgctgccagaaagggtagaaaaccatgctgaatgccttcactgttgcctggaatgggagcctcagtttcaccatctgtaaagtgagattaatgaaagggacccacagagggctgttagagccagtaggcggccaggcgcggtggctcacgcctgtaatcccagcactttgggaggctgaggtgggcggatcacgaggtcaggagatcgagaccatcctggctaacacggagaaaccccgtctctactaaaaatacaaaaaattagcctggcgtggtggcgggcacctgtagtcccagctactggggaggctgaggcaggagaatggcgtgaacccgggaggcggagcttgcagtgagccaagattgtgccactgctctctagcctgggcaacagagcaagactccatctcaaaagcaaaagaaaaaagagccagtaggccaggcgctatgtcttacacctgtaatcccagcactttgggaggcctaggcaggcagatcacctgaggtcgggagttcgagaccagcctggccgacacagtgaaactccgtctctactaaaaatacaaaaattagctgggcatggcagcacatgcctgtaatcccagctactcgggaggctaaggcaggagaatcacttgaacacaggaggcagcggttgccgtgagcggagatcacaccattgcactccagccccggggggacagagtgaaattctgtctcaaaaaaaaaaaaaaaaaaaaaaagcaagccagtgggcaaggacacacaccacgcccagcacaccagaagcatgcagcagatgctggctggtagccacagccatggtagtaactggcatcactggcccaagggggtctccctacccaatgtaccagcccagagggtgctaaatgacccatgtttgtgggcatgtgtaccccagtgctgaacctccttctggtagattttcaagcaccattttggagaagggaggcagggaccacagggggccagccagcctgtacaggttttttgtgttttttttgtttgtttgtttgtttgttttttgaggcagggtctcactcttgcccaggctggagtacaggcagtggcgtcatctcggctcactgcagcctcaacctcccaggctgcagcaatcctcccacctcaccttcctgagtagctgggactacaggcacacaccaccaaccctcactattttttgtagagacagtttcaccatgttgcccaggctggtatcaaactcctggactcaggcgatcctcccaccttggcctcccagagtgctgggattacaggcatgagccactgcacctggcctaccagcctgtaaagcttgagggctgggctccaactggagactcacctgcctttcctttctcttcatcagatgtgttccagctgccaagaagccggggccaccattgggtgctgccacaaaggatgcctccacacctaccactacccgtgtgccagcgatgcaggtacgagcccgcccaggaacaggagggcattggagcccatccaagcagtccagggggaccctccctgggcacagctccccaaacccaggccccatctcactcttcagtttccctcctctcttgccccagcaattcttttatccttctgtctgcctagacctctgctgggcaatgccagggacatggaaatgaggcattccccaggcacctgcttgaggagtgcccagagcagtgagggaagatagaagcataaattacaatgtggaatgctgtctgcggagccatcattgccaaggggcagggaggatctcaggcctcagagagaaaggggtattggaggttgggcctttgaaggataaataggagttcactcagcagagacaaggggaaaggcactactacaacagcaaaaaccaactgagttgggggtgatgaggttcaaaacagactgagacccatggagcaattgtggaagttttgaagcagggtaatggggtatggaggtaggcccaggctccccgcatcctctccccggtccttcctctcactcatgtattcatttgttccgcaagcatttgttgagcccctaccatcactgggcacacagaatgaccgtgcatgggctggagccacccaagagcccttacctttatcgaccaggtggggaaactgaggctcagagacattccttatttcatccagagaaagcaattgcttatggtacaatattagtcattggggacaacaatattttgggagatatggggccaactttggcctggattcaaaccctagtggtggggggtggggtggttttcgttcttgtttgagacagagttttgctctgtcacccaagctagagtgcaggggtgcagtcgtggctcactgcagccttaacctcctgggctcaatcatcctcccacctcagcctcctgagcagctgagaccacagatgtgcgcagccatgctggctcctagtagtgtttttatttttatttatttatttatttatttatttatttatttatttttgagacggagtctcactctgtcaccaggctggagtgcagtggtgcgatcttggctcactgcaacctccgcctcccgagttcaagcgattctcctgcctcagcctctcaagtagctgggactacaggcgtgcaccaccacgctcagctaatttttgtattttttgtagagatggggtttcactgctttggacaggatggtctccatctcttgacctcgtgatccgcccgcctcagctgcctaaagtgctgggattacaggcgtgagccactgtgcccggcccctagtagcgtttttaatgtgtggtcttgagcaagttggttgatacctctgcacacagtttccctacctgtatgatggagatgataatagccccttctctgcagagctgctgggaggagagtgaaataatgaacactacccacacggtgctgcctcagtcctattttgggtccagcctctgtgacctctccccacacggtgctgcctcagtcctattttgggtccagcctctgtgacctctccccgtcaccctcaatccctcccaactctggcctggaaagaggcgaagtcataacccacctcccagtggacagagtccaggcccccccaggctcccgtcgctctcctagcagccccagctactgcctcccgtcctcacctgatgccctgctggctttgcctggacaggggaccacagcctgtaccccacctgcctggtgggtccccagccagtgtcagcccagccaagctgccccagggaggacacagaggactctgagtgctgacagttgcttggcaggggctgagctgccgggacccagcggggaaggggcttgctggagcagggacgtggaggattctcactggcttcacgctcccactctgagcagtgtgagccagagtttaacatggaccctgccacttgcccaggcatgtggccgcactccccataatagctgccacgagtcacattcctccttccacagtgattaacttagcgcccgctccactcccagccctgctacagaaccatgttgtttccagccatcttcacagattggctgcctcacccacagcacacagcatggcgtggacagtcccaggacttaatgccttggctttcttgctccatgtcctatgttctttctcctaccccagcactgcccagccccccaaggggctcacccttgagtgggacggacagcaaaactgtggttcttggccacagttagggagaccagacgggaaggagagagtatgcactgtggaagaggttcatcctgtctgaacaagggagaaatctaggaagacttccaggaggaggtgacatttaagccaggcctcaaaagatcgggggagctttgtagcaactgtttagtggtgggacttgtatactaggctttgagcaagagaacttttatttcagataaaatcctagaaggattcctcatataacagggatccctgtagcaccgtgaagattgaggcaggaaagggactgggaatgctgcaaatggagacatacacctcagagactgagttggcacagaatccatgggacttgatgatgagggagagggaggtgacaagcctgatgcccagcttccccatgaaggggagaagtagggtgtggacgtgcaaatggagtattagctgctgctgcagagctactggcccttccaggcccagcttcatgtctccagcaccagcccttcattagttctcaaaagggcgtgagttggctgcaggctctgctgggagcaggatgatctagggtggccccagctgtgccagcttgtctttgctccatcaatctctcatcctccagcaggctggcctgggtgcgtcctcatggcagccccagggctttgagagagtggaggtcacagggccactcacagcctaggtcctggactttaccacgttctgttagccaaagcaggtcccaagtccagcacagagaagtgcaggccacctggggtgagctgcagagccacaccacaaaggacctgggtgcggggaggggactgggctgctctgccaggccatctacacacacggcagttccctttggccacacggcagtagaggcagctgtggacatacaaagtgtagatagctgggctcaggatcgagtctcgcccaccatcagcaggcgagggctcatcagagccctggaagggacaaaatagcagggttgtgttcaccatggaacagctggctgaggaggagggtggacccctgggaaactgaggaacagctgccagagaaggcgagggagaacaagtgagctcgagagtgaaggcggggaggacgggcgcttggggtgcagggagggcccccagcgtgactctgccagccaggcggtggggggggcgggggggtgggagtgagagggcactgagggagtgggctggtcaggctgatctgatgtctggccagggaggagccccaggcctctgtgtcaggcactgggactgcagggcaccagggctgcccactggctgccagcctctgccctgcactgcgctgtcctggcctactcatcctgcccccttccaattcttgttaaggaacccactttggagacaagcagtgactgaagagcaggcagaggctgctacaccacagtgtcctgtctcaacctttccccactcaggccctggggccaacctgtcagtgagtgcccaggttccccaggtgcaggcaccaggtcaggagccagatcactgaggactggccttgcccagtgactcccgccccgtgccccatgtggggtggtgctggggcagtgctgagggagccagtttggaagtggcgacctcctaccctcaacttcccttggtgggagtgcccgcagctacccaggcgtgccaggggcaggcctgggattttagcctagtgtctttggaatatctagttcagccccagaaccacatctggcttgcctgagccaagggaaggggaacagccgtggcacatctctagctgctggccctgaatggcagtttccaggtccgtggcactccagcttctggagacaagggcagatcgcctcagagaggcctgctaccacccagccctgccctcagggctgcagagctgtccctgccctgccttctggccaccaccctgtcatgatgccattgcacagagccacctccagtgtgaacaggaagattgtgttggagagagcaccagcctccagctacttttgggtctggggtttgttcagaacagtggctggtgaggctttgggggaggggagccgagaaggggactagagactggggggtccctgggggaaaagccagcttctccctaggtggcagtaggcaggggagtggagactccctgagatagcaacacctcctgggcctaggtgggcataagcactggccatgcttggttgtcctctctgcccctgcctcctgcgcccactgcatgccacacatgtgcagggtggtttatttttaaattttattttattttatattttattttattattttattttattttattttattttattattttattttattttattttattttattttattttattttatttcatctcagacagggcctggctgtgttgcccaggcaggggtgcagtggtacaatcacagctcactgcaacctccgcctcccaggctcaagtgatcctcccgccccagcctctcgagtagctgggactacaggcatgcgccaccatgctggctaatttttgtatttttgatagagatgaggttttgccatgttgcccaggctggtcttgaactcctgggctcaagcgattcattcacctcatcctcccaaagtgctgggattacagacatgagccactgctgctgccaagatggtttctatacactcccatcctcaatctccatgataggcatacagtaggtggcataatgcccattttacagatgtggagactgaggctcagagaagtagcagatgctcaaatccaggcttgcaacaccactaccagtccgtccacaggggttcatgacatgctcactggaagttagtgagctcttccaggggctgggcatacatccagggaagaagacagagctggtgccctctgggagcttgcctgccagtggggaagaaacaaggagcaagacaagatcacacaggccagtctcttaggaggcagtgacaagtgtggctggcagagtaaggcgggagggagggagggactgagggactgcctcaagtgaggaggggcggcacgtggaactcagggggaaaagctctccgcggaggaggtgaggtgagtcaagactgccaggccaggggccgcacccgcgccgtggagtggagtggagtgtggagggttttgtgcagaatctgattaactctttgaaaagagcccctgcagtctggagcctcgcgggcagtgcggctcccctcctggctgcagacaaaaccccacagctgtggggcccccaccctgtcctaaccaccgaaacttctctttggtcacaggttgcatattcatcgaagagaacttttctttgaaatgtcccaaacataaggtaggggaccacagtgttttgtagggcgaggggtgtcaagcgggagaggagccccacctcgcacctccttcacagtcccctgggcccccttggctgcgcagccccgcagggcccagccctaggggagggagctctccccgcccacccccaggagcccccgccgccgtccagctcaggtccctgtccacttgcgcgccgccgccgccgaaaacccgcaggcgtcggggcatgggcagccaggggctggagggcgtccctgggacggcctccctgcagctccccaagataggtgacagagtggggcaggcgggggcgcgggacggtggcacggagctgaaggcgaaggtgaaggtgaagctggacggggtggggccagaaggggtggtgccgacggcctcgggcggagaccccagccgcgctctggggtcgcctgggtctggggcttaggcggggggcccacactgggggcggggcctatggactgtgaagtccgaggtcgtcggtaactggcgggcgggcgtcttttgcagaggctgccgtagtaatccaccccaacggccggaggagccgccggagcccgcctgcccgcccgccgccgaaggagaggagccgcctgcgcagcccccgggcctttgagctgctcccagcgctggtccagagccgatccttgatccgggtcccggatcgtggatccggccgcctagggctcagacttgcggccccgggttgggaggaaaacccgttccggagccgcctgctcccggaaccggacggcacagggcgttcttgcccaccccaggggccaggcttgcggagggggagcccgcggagcggccagactccccggggcgctcagcctccggcgagggtgggagacggctttgtcctggggacactttccctctggaatctcaagacgacgtggcacacattccacgtgggtgctgccgccaccccagtcggtcgtggcgtgcagctgggagccctgggcttgggggtgggggtcgaaacagtactggaagaggcggagggcggctcctagctccgtggactaggcgggggagaaaggaagcctttctgagagcgggctaggccggcactggagaggccggagcctttggaacaaaccgtgcggaacgcgtccaggggccttcccgcccagcctttgccagatctctcgtgcggttcgggcaaagccggggtagacctgggctatgctcagttaggggttgcgggatccccgagtgtgggcgggactgggacaccctttggcctctgtttgtcccctttccagtcctccaccccacccctggagcccagcctgggagcgcaaaacccaagaagcggccagaacgcacctccggctccggcggacgcgcgaccgttgtgcaccaccagggaccgccgcgcctactctgcacgggagcagggacagcgctagatttcgtgtacaaaacctgtgtacccctctatatatatgttacatagaatgtatatatgttgggaacatgctcgcttctcccgtgtgtcgccgccgtgcgtcgtgcgcccgcaacagagccccaaccgggcctttgccgggtaaggggctaccgcgacgccacttgtccacgcagccaccaccggcccgggccagtccctgccagtccgtccgcctgtccgtccgtgtcctcagctctgtccacgcttcgataggcctgacgcagcccccagcccagggccgccctagcaacttcctgtacatatgactgtaaaatggtaaacgtgtgtattatatctggcctcgttatatagtgtatatatatgtatacatatacatatatataatatatatgaagactgtaaatgttaagacgactagtgttcttattagtatattgcttcacactgaagattgtgtgtatcgagctgtttctaaaagatgtttattttccttaagagtaaaaaacagtcattgcattcagaaaaaaaaaaaaaaaaaagtcaataaagatacaacgattgttttggaaaatctgcagcccgtggattccgaccagattcagctgggagccgggccaggctttaggttggggaatgggaatgaagggaggggctgggggggggggcatgaatggagtcagggagtcggcctttcacagaacaggaaacctcccccgcccctgtgccccctctccagtgtggcggcaggtcgggagggaggaggcttctttgctgtgagatgaccaggggccgggatgggggaggtgagacgtgccagacttcttgcagggagacccaagctgtagctcctgtcacacaacaggtcctggaagtcagtccatcctcccgtgccacccagggacctgatggggacagagctgggaggtgagaagggacaactgaccccatggaggccctaagggttgacacagcccaaccatgtgccctgggagcagggggaacaggtaggctggaggccatacagccagccctccccactcctcccactaacaaacaaacatcgggaagagctaagttaaaagttgtgtaccttgtggccggagggggaggggaagcctttccctaggtgctgggggagggcccaagcactctcactagtcagcacatccatcagctgaagacacaaaacccagattataaataatttcatttttaattctctgtacaaaacttctcaatctatgaaaataaagtttgcaaaaggcaaagtagcacaggagcctcaggtcaggaggctaagcacgctgacctacactatgtacacgtctctctcccacgacggagagagaggcctctggggcagagccctgcttgcagtccgggaaagccaagttggcttccgtcagcacagggaaatgtacccctctcttccctgtacacaggaggaaaaaagccactaaggtgcctgcagagcaaggaggggggccccccaaaatggctcggcccctgcagtgccccgatcggccaccagaggtcagcaccatcatggccgccggtcttagggtcaagatcgcgcccctcgggccttccaccgcgaaggcacacagcagccgcaggtcgaactgtggaggccagagtctcttgcactgccttcggccttcaaagcttcgacgcaggacagaagctgcacgggaccaaagtggctagagacaggggtgctgaggccggggacacggggtctagctggaagtgacagtggtcccaccgcccaggcgcatgagcatctgctgacagtcgtgcagcagccggcgatcgccaagcttctcgagtgtgcgcgccgcctcagccagcatgcccacgcgctgcccgggcgccgacaggaagccggggggcaggtagcaggaggccagcagcaaggcctccgcgtgctcccgccgcgtgggccgcggctccagctccgccaccgcgcctgcgcacacgaggatgtgtcagggatgggtctcaagctggccacgcccccgcgggagccctgcccacacacaagccacggcaccagccgcctgtacctggcacacaggtacctggcgggggcctggcgggttcccctctccccaccctagtctcagcccacacacaaagtccacagactgagtcacgcacgtgcagtcatgtatcccacaaatgacagtcaccccactgattccttgtgaaaggaattgtcatcaggtaaccatcaagaagatgcttggtctttttttttttttgagacagggactctccctgtcactcaggctcactgcggcctccaactcctgggctcaagctgtcctcccaactgagcctcccaaagtgctaggtgtgagccactgcgccaggcctgtctgtcccgtctgacacacacacagcctcccttggtatcacatcccatgtgcgcccttccctgctgagcagacagcacatccctggtcagcagctgccccctcacctcctttgccaccggggcctgcccgccgcctcagactgcggtcgaggagctggtgtgtccgtgtggggctggcccccgccatcagccgggccgtggcctcatgtaggaacacctgggggccaggagagtggaggctcagggctctccatctccaccactgcctgactccccgtcttgaggacagggccatcgggcactcaccctccgcatggcgggccggaagctctgtgccagccgcctcaggctgctcaggtcccgttggaagccacgcagctcaagggcggaagcctggggcctgctgctggtgccctgggctgctggggccggggccgggggctgctgctgccgccacaggctggtgcgcaccacaagaagcaggtcacacaggaacagctgcacggcctgggggtggcaggcagggcaggggtcaccagggctccagctctgggaggggcaggatgggggcccgtggtgccaggggccggctccgggctgcactgccgaggcactgcacccgcctcacacacgtgcaatgcaacagcaatgcaccgcggggccgcccgcctctctcggcccccacacccgccaccggcccgggagcagctgtccagccctcctgatgcagggcctccaaagggatcctaccacaccatccacccccctcctcccagggatggggaaactgaggccagataggggcaacccctctcctctggacagaagccttagccaaaaagcagggtctgctggaccccctatcctgtgctgcttgggctaaccccatggtcttctgcagcccctgggggctggggagaggaaccagggaatggaaagctgaatcccccagccctgccaggcccctgaccccacccctcaccttgtcaatggagctgctggctggtgtggtagccaggctgtcctgcaggtacccactggccttctcacagatggtcaggctggctggaccagactctgccttggcacagcccagcagggcccgggcagccttgaaggagtgcagagctgccctgggcaggggtctcctgttgggaccagggcagaagagtgccagtcagaccagtccacaagccctggctgagtgccccccacttccctggctcgagttccctgaggaaaaaaggtggtgactcctcctgcacagaacaaaggctgagtgaggcacagtgcccaggggatgaggaaggctgagcccgggaccaggcaggaggaacctgccgtgcactcactcagactcctgcagcacccggggcaggtgctccaccagcgggcacagccgctcagccgcctcctcatcccgccgcagccagtggatcaccacagctgtcagagaggcccaccacttggccaccgggtctacgcctgcagaagagggagggtcccctgaaccctcagtcacgctgcacgggggagctgagaagggagccaggacaggggccggggactcaccggtggtggtggccatgctggaactgatggagaagctgtaggcaggagcccccgcagcatcagaacagctgttcagcagctgcaggtacccgagggcatccgagaattccctgtggaaggagagagctggctgtcggaacagatggcaggggtcctaggagggtgctccccacctgccctccagagtacagcctggcccctggctctgcaaagtgccactgtctcctcccacaggctggtggggagaggaaactcagagaggaatgaagcgtgcatggcacgcacggtagcccagctctgggctctctccacagggttgaggccagagctattctcagaatcccgccggaggggccttgcctggaggagggcacaacgacacttacttgtccccatcagctgacccagggctggggttgggctgggtcacacagttcagtgctcgctctaagagatgttcccggaatagctgagtcacctgggccagggggtccactgtggagaggaggaggtgagtggggtggggagcagggccccaccctcctctccaagctaagggctttttcctgggtgggctggggccacacctagggccactgggaagtgccggcatgcccctgggtgcagcccctgccaaggacaggggaaagcgggtggacataactatcaccagcaccagccttggccaggagacaacactgaggcctgccctacactgcttccaaaggaaaaccgacttgagaagatgccattgttggctccgcttccttactccacagcggcactgcctggggtcacttctccaattagccatctgcccatcaatccctgcatgtgcttctgaaagccccaatgggaacgagaggcacccaggcctttcccttcctgcaacccccacagcaacaacccatggcagggagaaggactggggtggccagagacagccagagattcaggcgacaagggacaggacaggaatgaggatgagggacaggagaggggacagggaaggggtaagagagcacctgggttcccggccaagctgtacaggctctcccatggggtactgagcacggaccagtccccatccacgaagaaacggtggcccacggggtggcagagccactgcatggcaggaggcactgagccactctgtgccaggcaggcctggcgggcactgctcaggaagaagcgctgtaggggagggtactgggctgtcacagtggacacagcctggggccagaccccgggccgagtcccagcttggcctggagtccccctggtaaccactgccacatcccgtgtagctcttacccagggagcctctggagagagctgcagggataagcccccagccccccaacccactcactgtcagaaaatgcaaggcccgtgggagactggtcttcactctcaatgcagccgccacatagatctcggccagcgtcgccacagacacggcatcccctgcacactctgccaggttcagggcactcagcgccaggttggtggcagtgaggtgcccgcctgtgtgcttccctggaaggcaagcaggcatgaggctgtgggtggagcacaggcagcagggagcacctcggagcccgccccacgctcagtcctacccatggtgtgcagctggtgcagcttatggtagaccagggctgcgtctcgggcgctggcgctagcatccactcgcagagcacagtcctgctgcaggccccctgcccggcctgccagccagcggcccacccagagacgctgcagcaggtgacggatgaggttccagaggaggctacaagccaggtccaggtgggaggtgggcaggggccggcccagtgcccgcagggccagccacagctgctgggcagcctgggcaaagtctccctgtggatgagggttttccaggtgagaaaagtgaggtcagagcagctgccccaaagctcagaagagccgtccacagcaggctctggaggggtggtgggggtctgcggatgcgtggctaggcacagggaggacgggacagattcatggtgtgcacagggagcaggaacaagggttgacacccagcaccttcacagcctggggtccctgccctgcccactctgccggggccagccccttacccgggccaggtccaggtcagcctgcttgcgatgcctccagaagtacacggcggggcctgagtggggccgtgtgactggctcaccgtagacaaagagaagcaccaaggagacgagcaccaacagcccattgagcagccagaccactgggggcagcagccactgggcccagccagggccatctatggacagagggaaagctggggacacagctcccaggaaatccagagccccaagttcacaagcctgggggctcaccccgagtgtccctcccaaagatgcccaggctggccggtcccacctctgctctcggtgcccagcacgttgcgcccagggctatggtagacgctggtggtatctgaggggctgggaagcccccgggcccccagcaaggaggccaaggggttgcaggacaggcagaggaagacgagcgtgcacagggccaggcgggagcggtccagcatgccccggctgtgcagagacggccgctgctctggctttgcctggtggggttgggcagggtggtgagggcagaatcggagggaccccagagagcatggggctgggaaggggggggtcaggattctgcccaccttactgtgggaccccacgtggctccaggcctcagttattctgtctatgaaatgggaggtaggatctgttagggtcttcccggccctgtcatgaggctcagaggatatggctgggagtggggaagggggcaccgtggcagggcccaaccttgctgtcctcaaagactgggctgtcaggctccgagtcactgccactgccaccgctgccactgcccctgctgccaagggacaaggggctgctctggaaaggtgagccagcatccgaggggggtggggtcagtgtgtcctccacctcagtcttcacgccctccatgagcacgtctgtgttccctccactgccacaggccgacaccagatccttcagagattctgtgggccgaaaggaacagagccaggagtaaaggctggatatgtgaccccaaatcagagcctaggcccttggaggcctagggactactgtagctcctaaagctagcccaggacgctttgatggggctgggttagggccaaagggaggcaccaggtctctttcaggaccagaggtaaccaagggactagagctgaatgcagggctacagccaagggtgaggtgggcagggcagagggtgggccagaaccaagggtggggtggggctagggatggggtggggccgggaggtggagcaaggctagagaagaggccagactggagctcaataaagccaggactcactgcttttgtggacagcagtgcgcagacttaggttctcctgcttgagtttctggttgctgtgttgcagaaagcgaatgtagtcgatggccttgcgcaagacagcagatttattcagctgcacggtgtgggagggagggggagcgcacaggtggcctgtcaggtcgggggttgtggggttggagagccctagcaagggggtgcggagctgctttgcaacattactgcctcaggacctttgcacttgttccttctacctgaaccgttcctcgcctagtagcacccacctcccaggccgggcatagggttagaatgtaagatgcagacagcagggtctggctagctgctgctgtgcctgccgccatctcagggaggccttccctggctaccaccaggggaccctcaccatcctcttcctgctttctctgcaacgagccaaacgtggtggtctcgagcacttattcatcctgcctactgtccatctcccccaccagaaggtcggctcttctttgagggacaatttttgtctgtcttgttcattgctgcatccccaatgcctagcacagccccacctttattgaagaggcctgcaaaccagtttaactaaataaacgaggctggccaggcctggggaggctgaattccaattccctgcttgtccaggctcagtctcactccctctcttccttccagttgcccctgatctgttccttcctagggacaccccggtctgtgcccctgcaggcctctccacacctttgcctcagtgcccaccaccagatccttgagctcaatgattttgtcattgatggaggagcggtagcgcttctcaatggcgttgtgggctgtgcgcttctctccacggctctgggcagaggccggggccttgctgccagctgcgagccggttgataggcagcttctccgcatctacgaccagtgggactgttgccaagatggttccgccactcaccagggtctgcagggccaggcacatgttaccaggtgggcatgtgtgtgtgtgtgtagaccccactcccttatgccctgcccacgtcacccaccggcaaaggccctgtctgcacagtggtgccagagaccaggggactgagacctgccgccttcacagtggctccgtctgtcttcatggctgtcagaagcagcgagtctgccttgatgaagtggggctgcagcaggacctgagggtgggagaggcttggctgtaagctgtgtgtctgggctggggctgccccctccccaacccctggccagaccccctcaccgggacctgctggatctgcgaggtcacagtggtcgttacaggggctgccgtgggggcagctgtgactgtcagtagctgctgggggaccacactctggacctgggtgtgcaaggagacgggcgggacccctggcggggaagccagtggcaggccaggcagcggctgctgggtgttcccgggagggcttcctgcagaaataaagcatggggctgcagacacagacctccctctcccactttcaacctgctcttcaggtctctatcaccgactggccttggatgagtcattgccccatgtggcttcctatggacagtccctgcctgggctctgatgcaaatgcactggcttcaagccaggcctccagtgcgaggttgcgcctaccccggcaacaagcacaccaggactgctagtaacagggcatctcaagcagccgagtggagccccagtttctaaagcctgcacagacctctactcacatcacagcagaagcttcttcctgtgctcctggaagccccaccccgggtgtcccctcccgccacacatcccccttacctgtagagaagcctcccggagggctggggtagcctaacacaggggtggagctgaactgcggtggggctggggctgggaagctctgtggcaggagggcccctggcaggggctgtggggtgggggtctgcaggatgctcagtggcactgactcttccttgataccaggcccaggggagaaagcgggcatggacgggtacatcttcaatggagtgggtgcaggctggggaggggacaggggtgagggcgctgcctgcggcccgctcaggaaggcttcaagagaggagctcaatgtggcaggaggtggagacaagctgcctggggagctggtatcggggctggcagggtctgtgccccctgccccactcccagcatagggtgggtcaaataggccagggaagtcactgtcttggttgttgataagctgaagcatgtctgtgaaaaggagaagagggtgcgtgagtgaggcagagactgacccccaaacagggcatcacacacatccaaacacaaccttatttgcacaacccttgttggcacacagctgtatgtgtgggcaatgccaccaggacagaaagccacccacaggagctggtgttcccggacatacagccattttgcgagcacctgtgctgtctaaagcaatgcctgctgctgcgagtgcatcacaatacctggacaaggtgggcaccacaaggctcacaatcttgccccacagctaggctggggctgagcccagggtcgggcccaagactgcagacttcagagcctgagctcttcccaccatccggtatttgcccaaacatctagaaacatccttagtccacagcaaacagcaggctcacattcattcactcatccagtgagcatgtgctgagtgctgagtgcccacactatgccaggcactgctcccggctgtgaataagggaaatccctgcctagaactaagcaactttctggggagctgggagtgtcctgtagcttgatgtggatggtggtaaacttttactcctgtcttcatggggcatgcattctacaagacatccacctctgagtccacacacatacacacacacacacacacacacatacacactgcaccgtggactcagaccagcttccaagcatttgcccatgaggtgaccaacccttccagacagctctcctgccctctccacagtccatcacccccaaccccacacagaacaaaaggaatccagaggcccaggtgcagccttccctggctccacttggggcctgtttctcaatgtgtgaaacggggggcacgcctccatccacagatccagcagctccagtctttgggatggagatggggatggggagggaggagcagtctagggcagagggggtcttcatataggagcgatgggccccacaccccaccattggccactcctggtctcatcctaaaacgcacccccagcaggatcctctgggcactgaatttgacaaagcaacttagaaactgctgaggagtgggtgattttcccctcccctcagtttacagggggaagaggggtgcagagagaggcaggattgccttgaggccctgaagaagtggtgggatcctctgtgaccaaggaccaactgtgcagcctgggcccactcttcctagggcagcgcaggatccccaaagagaatggcagacagggaagtcccccaagaggaccccagatcagagcagggtcctcatccacactagaaggactctaagggtgggggcccatgtcagaagggtgggtctggtccaaaagccaggcccgctgtggggctacccacattgatggggccaggctagacccctaatcctcacccacagctgagagggtgatgtgatcattggccccattctacacgtgaagaaactgagctgtagagaggtgacttactggcctaagttcttatagagtcagagactcaactgagtccagaccctattttgactccaatgccccaaccactggccactaccctagactacctcaaaagattagctcacctcatcttggagacaagaaaagacactgaggctcagggaggaccacaagcagcccaagagcatgcagtggggttcaaacccaggtctacaaaatcccaaatctattgtctctctgccttttcttgccccactaagaagccaagagccaggctgccatcaccaacccattactcagtggaacagaccaaggcttagggccaagccagctgctggccacatggccaaccagtgtgtctctgtgtagagttctgggctcaagtccaggctttgcctgcagccaagtagcctcaagacccaggcctggccactcagggctttgatttcatctctgtaaaagcaagtgctgtctgtcctgactccttcctcctcatacagactgggacacactcccacctcagccccacctggccaagggccctctcccccagctggtgactagcagcctatctggctcagcccagggccctctaacccactcgtggtggcacccactgggtcagaatgctctacaggacccatgggggcctccagtgctctcaggatccccagcctgagctcccagccctgcccaccaccagcttgaagtggagcctggaccaacagcctcctctcactggccccagtttcctcatctgtacaacagaaaagactaaaccccttttggtacggctgcccgaggctttgcttggcaggcagctggcaccgagtggagacccaacattgcctactgacaggtacccaggcagggaagctactgcaggaggggaatttcctagagcagttggcagaacaggatggggtggcagccccagtcttcctggcttctcaagtagaaactctcctggtttgtggaccccccaggtcacaagtcatcaagtcataatggactttcaactgcagggtttcccatccctttaccccagtccgtgtgagcctcttcgatagatgggggaaactgaggcctgaaagaaaaactgacaattttgacaatctagggctcccactgtcttcctgaaaagtctaagatgcccacaataggcaggggtgctgaatagggcagacgctgtggcagagggacaacgggccctcctccctgcttcctcctggtcctgtcccaaagcgggtgcagagaatgtagagaagaccaccctctccctccaaaccctcttaggtcgggatgctgcttttgggtctctaagcaaacccttcccccttgagttgcaggggacactaatttggttggaggtagccctccacttccccagcgagctggtaactgtcacaccttctccctcgggaaggggctctttcctgctcaagttgcgtagcccgcatgcccgcccaccccaggagaacctgcaggagacggaggcattgtataaagggctggtggggaggcctccaaaaataccttcgaaagtgcaatccatggctccgcgatctgcgcccgcccttggggcgtccaggccgttggccctacccctccccgcgccgacttcacctgtcaaggcgcggcggatttttgaagccgttgagcgctgcggcgcgcccgccccgccccgccccgcccccagccccgccccagccccgccccgcctgcaggtcccgccccgccccgcccttcggggctgcgggccgggcatggggtgagcgcgcgcggccaatcagcggccgcgctgccgcctcgctagggcccggccccggcccccgccccacctccccacggcggcgggggctcgagtttcaccccgcggcgctgaatggggttggggttactagcggacgtccgcctttaacccgctcggtgccagcgtctgccggggttactggcggtcactggccctcagctcccgcccccttcgttaaagggtcaaagcagagaagtcctggcccaacacaccagaactctgtgttcgaaatcactggttcgctggcaccctgagcgagccttaaccgctccaaccctccgtttactcctccagaaaacaggacagtcattatctccctggcgtcgaatggtagaagggagataatatgggtgcagcacttagtacgcaagaagcgtttaattaaggccaagggctgccgagtggcagctgcggtgggtgcagggacctcccccttctagggcagccccaggaaggggccacccctcaccacagcggggctgatggtctgggatgaggccactcctgaaaacaggtcacttccgggaaactgaggcctggaaataagggtttcctgactgccagcaccgatgtccctctgccagatgggtgaagtctgcccctccccctcaaggcctcacaacccagcagtcaccaagtgagtcccgacccactattcattgtagggccctgggaagccaggaagggctgcagtccctaggacagaagatgggtaaggaaggggtgacaggctctagggttcttttgaggaggtgcctgggcctgtcttccctcttttgtcaaaggtaaaagttacacacacacacacacacaaagtgatcagagcctggccagttgattttgcagccaagtagaccaccagcaaagcctgcctctgccccaaactgcaggccagcgcctctgcctggtccacaccccagttggctgcaacctgagagggtgcctgaaccctgggcagacccagcgactcagcagtccattgggggctggggtccctgcggcctcaaccttgctctctattcaggaccctaagcaagaaaacccagccatgtctctctcgcaacctgtcctcgccaccgccgtccagcccaggcccttatttcccagctttgggaggttcaaggacaacagacggcctctctagcatggcccaaccctcccctcagcccgcgggtgttccctcacccccaaaacaaaacacagcattgctcttggcaaaggctctgacatgagtgacttaagacagggaagcgtccttgacccaaaagcacactgagagctgaactccaggcatgagttccccatggcctcccagcctggttctttcattactttgctccccagtttctgagcctagaatgtggtgagaccaacaagcagatactagcctgagacagcagggccagggccactgtgaacagtcaagcctgtcccctccccttacccatcttggctttaccacatattcctgcctcttattgtgtctttatttgtctcatcttcctgctctaaccccctcccatcccactgaggaagcgcgatgggagagggcggttgctctctgagccccaggggcagcagagtcattaaagactctgatgggggtggggcggggggggccttccaagaggagggggtgtgacctgggaacagagggctggcccttgggcagagggcacagactaagctaagatgccccgaggaagggggaagggcctgggtgccactggccatggccagcctctgaaactcaaggcctggccaaaccctggctcactctcccctggggctgatctactggccaatttcttttttttttttttttttttttgagacagagtctggctctgtcacccaggctggagtgcagtgacacgatctcagctcactgcaacctctacctcccgggttcaagtgactctcctgcctcagcctcctgagtagctgggattacaggtgtgcgccaccacacctgtaatgaaatgtaatttttgtatttttagtagagacagggtttcaccacgttggccaggctggtctcgaactcctgacctcaggtgatcctcccacctcggcctcccaatgtgttgcgattacaggcatgagtcaccgtgccaatttctgtggaagctggtcaccaggttaagactgaaaaaggaaactctagagccagccctgcagcctccctcagagacacacccaagtgggctatctggggctgcatgccaggccctgctcttcctttagcccctcccttgctgtgtgatggggacagtccactccccaccctctgagctcccacacctacgatctccagaggtgggaattctgggaaagcaagtgtgtaaaacatccatcactcaacagtctcaacaaaggttagttctctctacagcaattagaatggtttagaactggaaagtcaggtagtgagttgcctgatacttgcagtattcacgttggagctccattaccattcgactgagtctttttttttttttttttaaggggagttaacggggccagtctagagtaaggcagctgaggcaccttgggtgcacaatttaaggaagagcctctcttgcctcccctagtccctgtcctggaagctgggagagctggtctctaggggctcactgtggcacccaaattgcggcccacccatgggtgaaccgggcttccctatgaacactgagaaggcccttgtggttcccacacacactctgaacacaggaaggaagaggaggcatagactctgggccatggtggccccaactgctccctagttcaccttccccaggcttgtgaagccctgccacccctccccaagcctgggttcctcctcttccctcttcttcttcctctcctgccctgattctatcaggacccaacaggaaacctgaacccccacctggcatccctccccagttctaccttcaaacctctctctgaaggcagatgcaggcgccctttaatgactctggccgatgtattctgtgaggccatgagggaaatcctgggcaggcctcatggcatgcgcttgtagggcccaacgctgaccagcacagaagcctacaacccaaacaaggccttgaaccccaaacaacctcctggaagagggagctcttcacctgcccccacagccttgtccacagaacccagatccatctctgacaatatctactgtgtgccaatcctgtgccaggcactggggccattatagatgaggtggtcagggcagcccatcttaggaggtgacatctgaaaggaggactgaatgatatgagggagtgggccggaagggagggcagaagaaacagtgtgtgcaaaggccctgcagtgggcgtgggcaggataggaggagcggaggcagtgagggggtggaggccaggacggccaccaaggagctgggattccaactcaggttggtctgtcatctgagccaaggaccccaattctccagggaatgggtgggaaagggatttgccaattgatccctgcactacagaccacaaagctgcaccaactgtgaagaagggtcagccacaggggaggatgtggcacaggtgctcatgggattccagagcacaccctctcggcctgctaatggaggcagcagggtgaggatgggtgcccaccatccctccagggagctgggctgcaccccacctgctgttctgctcccaccaggcacttccttgatcctcctaactggagtcggcggtcctcgtgttctcagctggtcgtgtatccagcagtggcacaggctgccctttgtgcactcatggctgccccgggggcacaagtgtgtgccagctcttcccggaatgggacgcacccatggctggagccccaggtgcacctgggcgcaggtcctcttgaggaaactaaggctcagacggaggcctcgtgcccaaagtcccacagctgccatatgaagaatctggtacacaaaccccattctgcggccccagagcctgcccttcagccccagcctgtgggggacagcagtgagccccaactccggcctgcctctgccctgaccagctatcctcatttgtcgcagttcagtgagtgtgtgcagagtgcaaagacagagaggacaacacgaagctctttaaggctcagctccggcactgcctcctcctggaggcttcctaaccaccacccccccagacctatccacctgccctgccaaattagaggctgggcctcagctgggggcccctcctgtcagggcctgaaccagctgtgaccccagcctcacccagcacagggctgaccacagcagggaccccagtcagaggccgtgcagactccagccatggcttcctccaccctcgtctgcctccacccccatcccctaactggtgtctccctgggcctccctttccctgcctgctttctgaacaccacaagctattgaaggccaggctgttccctccaccaggaatgccctttccacctggtgaattcctattcctccatcaaaacttgctctgatgccacctcccattcttcccttgtctgtgcccctccacatgccagctcccaacatactgaccgtctgaccctataaacctcagagccacgtttcctcctccccactaggctcttcccggagctacaggtgtgcggaattaccctcagcagcacctgcgagatggcaattacatgtgatgctggtcggcaccaattcagacaccttgtccgagaggtggcccagggcacatacttatcactggcagctgaaaacaacccacgggcctgatgcagtggcaattctgggagtagcccctgctgctgggcacctgttttcagtcaaaatggcagtgctaaggttaggcgcaggggctcacacctgtaataacagcactttgggaggcaaaggcaggcagatcacttgagcccaggagttcaagaccagcctgggcaatgtagcaaggccccatctctacaaagttttaaaaatagctgggcatggtggcatgagcctgtagtctccattactctggaggctgaggtgggaggatcccttgaacccgggagttcaacattgcagcgagctgtgattgtgccatggtattccagcctgggtgacagagcaagaccccgtctctaaaaacaaactggctcacgcctgtaatcccaacactttgggaggctaaggcaggcagatcacgaggtcaggagatcaaaaccatcctggccaacatggtgaaatccagcctctactaaaaatacaaaaattagctgggcgtggtggtatgtgcctatagtcccagctgcttgggaggctgacgcaggagaatcatttgaacccaggaggcggaggttgcagtgagccgagattgtaccactgcactccagcctggtgacagaacgagactccatcttaaaaaaaaaaaaaaatatatatatatatatatatatatatatatgtatacacacacacacacacactcacacatacacacacacacacatatatatatatatttctccctcttgagttgtttctctgcagcttgttttaaagctcatatgaaggcagcaagatgttttcgagctgccaggctccagtctggaaaagataaagccctttacaaccttccctacaacgtattccctttccttctagcatcaccggcactgggtgatggtcattgtcttttatgtacttttggtggctttgcttagtcccaaggctgtgaccagaactttgaaggtgctttcactcacatttccaaggctgccttgatgtgttttgcacagaaaccgccatctgtggccagatggccactctgcccgtcctcccccagccagaaacactgcttcctcagcaggttctttttgtttgtttgttttgagacagggcctcactatgttgcccaggctggagtgtagtggtatgatcatggctcactgcagcctcaacctcctgggctcaagcaatcctccagctttagcctcagcctcctgagtagctgggacgacaggcacactccaccatgccaagctaatttttttagtttgggtctcacaatgttgcccaggctggtcttgaactcccagactcaagcgatccccctgcctcagcctcccaaagtgctgggattacaggcgtgagccactgtgcccagcatcaattatcttccatggaagccaaggatagggtgcttgttccccatggcggggggtgctccccactggcctagtcagccccatcctgtctctcaccaactccagaccaccacatggtagatgctcagaacttggaaccatagcctggtacatcctagaaacttccagcacaggctccttgggtaattgctgctaacatttgttgagctaaacctatcgcgtgccaggtactggttaggtgctctaaatggtgatttgtttgttttctctaaaacaaacagggccttgctatgttgcccaggctggtcttgaactcctggtctcaagcaatcctccaacctcagcctctaaagtcaataagattataggcgtgagccactgcatctggctaaatggtgataataataacactaactggcattggttcagggcctactatgtgccatgcactgcttaagccttcactcatcggatccccacaattccaagaagctgcttttagtactgctccctttacattgttaagaacctgaaggttcttggacttgtccaaggtcatacagtagggctgcttgttaagacccctgatcccagccttctagctgcagggagcacagggaccccagagcctggcaggggcagcatgcagaggcaaggcctgctgggagacaggtgcagggacggggagtcagttaggaaaggagctcaaacagggttcggggtaggccacaaattccccctagggggatggacccccagccccgtcccacctcccacaagccccaacccagcaggggacccacacctggagccagtctcaatggctccctgacctctcacccctgagccagttaaggctttccccacctcacccccgacacacacagccgcccctgtggagcacatggtgcaggctgtcacacactgtcagtgcccagggtcaaaaggcatgtccacatggcccgtggctgctaggagacaaggtcagaggcacttcctctggccggcctgggctccacctgtcagcaggcaaagtccagatcccaggcctctgctggcagtgactcctgcctggagctgaccgggtcactcaggatgtttgtgtccagctaggtgaatgttgggcagaaggtaactcccaacccggctgagacaagggaactttatcttggagcactagggagccatgaatggttggagaccaggggagttctgtgctgtaagctagggcagtaactagtctagagctgtgttttctaaggagtgccagtgcttggtggaactagggagagaactggggcatgagatatcctggggagaggtatggggtggcagagcgggcccccattgtgccctaccagggctggcctggacccagcaaacagccagacacatgactagaagcaaggccctgttgtggctgggctgggcatgctgggagggacatcagggcgggagaactctgagaacgcactgctcggggcaaggtgacacccagaagggctttctgggaagcagcctctgacggggcttggcagacatctggggtccgacagacaaagagcagacatgacggggtccaggcataggaaagagaccccgaggccctgttccaggctcttggccagaactctgtttccgtctgcctcttctgcactcataagcttgtgcaaaattggataaattaatcctcagcagggaggtgaagactgccacgggcttaacaataatccccaacacaggtacagggccatctcctgatccatcctcccccgacagctgcaaggtactctgaggcccagaaggagacaggctcacctgaggtcttggtgcagatgcaggactcaaacccagggacactatagccagggcagtgccttcacccacagatgcaaggactcatggaggcagctccatccccaaatccattcacatgacaagagtttggctgtggcaggcagcaggaccggatggggcccaaggcccttggctggctcaccagggctggttcccagtctaatgactcaaacactgctctggactgggatggggaggtagccacatagcctctgacccctctgtgacccacttccaggcccccagagtagcccctgtggaggagcctccctcaacccctcatccccattcttaggagcccagtgcttaagagcttaagagctaggctctggagcccacagcctgggtttgaattctggctttgccatcatctggctgtgtgatctcaggcaaatcacttaacctctctggtcctcaaggccgtcatcttcatcatatgtctacctacttggggttgtcaggggattaagtgggattatcaacacactgtctgaaacacagtaagtactcaattagtgttttctgttcacattacgatcctccatccaagcagccagagggaactgaagctcggtgtgcccctgctctgacccccgactgtcctcacatctagcccagctctgcactctggcactcaaggccagcctggccccctcttatccctcatgtctctcaagggacctggcatttccacccccaaatcttcagaccttatcaaacctgctcagctccactcctggtagaagaagcttcaaaagcaggctcgacctctgaccagcaattcccctcccagaacctcatcctaggaacacagtgaggatccgggcaaagactggcctcagtggccaggcacagtggctcacgcctgtaatcccagcactttgggaggccgaggcgggcagatcatgaggtcaggagatcgagaccatcctggctaacacggtgaaaccccgtctctactaaaaatacaaaaaattagccaggcatggtggcacgcacctatagtcccaagctactcgggaggctgaggcaggagaatggtgtgaacccgggaggcggagtttgcagtgagccgagatcgcgccactgcactccagcctgggtgacagagcaagactctgtctcaaaaacaaacaaacaaaaaaaaaaaaacaaagaaaaaaaccggcctcagtgtccactgcagcagtttataaagataaaacaacctaggtgtccatcgacagggaatcaggtgggtaataagaggaaaccttactgtcgtctggctgttgacatggaaccaagcagattccaatcagctgtgaaccaatggaccctattttaatttataaaaatacagatccagccgggcgcggtggctcacgcctgtaattccagaacgttgggaggccgaggtgggcagatcacaaggtcaggagatcgagaccatcctggctaacatggtgaaaccccatctctactaaaaatacaaaaaaattagccgggcgtggtggcaggtgcctgtaatcccagctactcgggaggctgaggcagaactgtttgaacctgggaggcggagcttgcagtgagccaagatcgcaccactgcactccagcctgggcgacagagcaagactccgtctcaaaaaaaaaaaaaaaaaaaaaaaaaaaaaaatatatatatatatatatatatatacacacacacatacagatccacagctgcccggggctgggagcaggaacaggaactgactaaagaagtataagggatctcactgtgtgataaaaatgttcgacagctagtaattgtcacacaactcaaaaagttaactaaaaatcattgaatgatatactaaaaatgggtaaattttgtgatacataaagtatacctcaataaagtcgtttttaaaaaattgatgaaggccgggcatggtggttcatgccctgtaatcccagcacttttgagaggctgaggtgggcagatcacctgagctcaggagttcgagaccagcctggccaacatggccatctctactaaaaatacaaaatttaaccaggcgtggcggtgcatgactgtaatcccagctacttgggagctggagaatctcttgaacctgagaggcagagtttgcagtgagctgagatcatgccactggactacagcatgggcaaaagagcgagaccctgtctcaaaaaaaaaaaagtttatgaagagtgtgcacccatccccaaacacatataaacacacagagagagagagagagagagaagaaaagctctttcacataattagcagggcttatctctgggtggtaggtttaaagttttttttgaaacagaatctcactctgtcatccaggctgagtgcaacggcatggttatagctcactgcagcctctaagtccaggctcaagcaatcctcccacttcagcctccagagtagctgagactacaggcacatgtcacccacacccagctaattttttatttttgtagagacaggattttgtcatgttgcccaggctggtctcaaactcctggacacaagtcatcctcttgcttcgacctcccaagtgctgggattataggtgtgagccaccaccccaggtctaaagattttattttcttctttttgctcacttgcattttctaagttttctacaatgaaaaaagatgtgtgtaattgggaagaaaaacaggaagtttgaataaaaactgaaaaatcctctactgaagtgggtaaagctgagccctgcctagtgagaaggggctgcccccagtcttcaaggggctgggactgcccccactctctcatagactagaccttgggccacatggctgcccatgcctggcctttggttctggagagacaatgtttttatccatgagtcagtaagaaaggtctgtatcagacctctggcccagaccagattctgtcagtaagaaaggtctgggctgggagcggtggctcacacctgtaatcccagcactttgggaggctgaggcgggcggatcacaaggtcaggagatcgagaccatcctggctagcacagtgaaaccccgtctctactaaaaatacaaaaaattagccaggcgtggtggctggcgcctgtagtcccagctacttgggagactaaggcaggagaatggcgtgaacccaggaggaggagcttgcagtgagccaaaattgcgccactgcagaaaacaaacaaacaaacaaacaaaggtctgtatcagacctgtggcccagaacgggttctgttgtccaacttgcccatgaagggagggtttgcatcatttttctggaggtggaaactaaggtttagagggtgagagggcttgagcaggatgacaaaggaagtgaggagtgtccaggttcaagttctgaccccaaagcgcatgtcctcctggcttggtcacgttgcctcttgggactacactcactgggcccagtgatgtggaactggtagttgagtcaggcccagatctccctagggcttgggatttcagggttcatcactccagagggcagtgaaggacaacccctcgtgccagggataggggaggctgttttggaaaagcctcacaatcagggcctctcctctggggtcctcccctagcccagccccagggggaaggagggagggctgggaagcttctggggctggcaaccagctgggctcatctgcaaggctgcagtagggcaggagtggtggtggcatagatatatctgttttgccaaccccagggtggccacgggttccatggacatgtccattcaggctgtgagtctaggcatcttgttcctgcgaccttggcctcagtttcctcatcaaccaagtgcaacttagctagtgctgctaaaactcctgcacagaaaccatgcaggcaatttgctaggggcttccgtttgctctatctacaaaatggaagcaacgggcctcctaattggcacttggtgccaccattggccccaaaccccttctcatcacagccagggtgatgctccaaagatggaagccggtgccactgttctgctccgccctttccctggccgaccaagtcggtttgcgtcctcctcctccctgacctcactcctttgcaagcctctaactcctcacacttaggccctgcctcgaggcctttgcccttcccttgccgtggcctggaaaacatctttccttgctggtcctgggggtgaccctcaggtctcagcttagaagtccctgaccgctctacccaaagtagccacatccctgccctcccccagcctcgctccacccaaggtacaactaaatacccgtttggtttcccgggagatttttgtgttccctaaaagagggggtacccaggtctgtctgtaaaccctcggtgcctaagacggggcctggcattcggtggatgtcagtgaatgagtgcggaggctgtgcccgtcgcagaccgggagaacccgacacgaggcgggggaagggcgcgaggcagcgcccatgcgcatgcgcaagagctccgacgccgagctgaactctcgggccggagggaatgaccgtgagtaacctcgcaattacgtcacggctggggctggggcggagcttcggcgacgcctgggtccccagcttcagccgtggccatcacagggctggagagtcaccggtcgggcggcacccggcctgggacgcgtagaggcgcacgtgtcccggcccggagccgccaagggaccccggcccggcccaggagccctcacccacaagcgcgcggcccgagacgctagcgcgggaaccagggaggctcggtgaggctcgggacaccgagctcagagacaccgggaagtcccgcgcgagcacagcacggagctggcgcccgtgggggagacaaaggccagggagacacctgcgcgccccctactcgcgccacccggcgcagcttcaagccctgcccgccctgacgcaccttcgatgtcggtcagcagcgccgcgtccagatcgcacggctcgcccagcgcctgctccaaagccgcctcgctgaagggtggctcgtccatggcgcagccgcctcctccgggaggcccgccgggcccgccgcctcgtacggcccttcctagggagcgccgccgcggccccggctctcagtcgccgccgccgctccgcgcgttcgtgtcctgccctggcctcagaggcggcccggcgccggcgaaaagttcctcggaaactgggttcccccggccgcagctctgctgggcggtcgaggcggaggcggggcctttcggggaggacccgccctcccagatagacggccccgccccaccttgagagagcgggggacccctgatccccggtctgcgccacaaatctcccctcagccggcccctcctccagagcgccctccagtcattcattttatccagcctcgcgcacaatggcagcggcctctggccggctgctgcgggaacgcgggcaagccgagccccctctctgggcctctgtttctccagcaccaagcaaggaagccgagtggaagccccaggcctgggcccatcccaaacttcatttcctcatttcctagatttgactctttagaacaagacagaccaggatccaagttataggggtcccaggcctgctgtgttgtgagcaggcctgatgtaactgctgggccagttacatcactctgcctcaattttcctcatttgtaacatgggcctaatgatgctttctcacgggcaggctgggaggctagtgacaatgtggaggggagcatgacctgtgagatcagcctgccccctctctgcaaagaaaccagaagattggcctcttgaggacaggagtggccaaagaaagaggctggaatttcgtcatctggtttcctcccagatccagctgtagggataggataccagtgggcccagtgcagctcctgaaggaggaagccagtacccaaggaagactggccccagggctgtctgaccccagatttggcacttattcccaggagcagccaggataggggccgcaaggaagaggtagctgtgctttagatcagagccaggctgccctggatcatcacaagctgggactagatcagagcaggcagccctgttgagaagagggctggaaaccgaacctggttctgtggcctagggacagagccaggtggggcaggaaggagggaaggggtcccaatgaggtgggttgaaataaaccagaattaacattcaggaatctgaatgtgataaggcagtgagctccctgtccccagaggtatgcaagcagagagaagcacccttggtggagggcagtccaggaaactcatcaggggcctgggcctcaggccttcccgaccccagaccttcataagtcaagccatcctgcagactgccttgctcaaactccagatatagcctatctggccacgccctaagcaggagtaacattcatgatgcattttagaaggggtgtgtgggggagagaagccacagagcccaagtccctggggctcagcctggacatccagctccctttgttcctctcccagaagtggctgcggtggaaaattacccagaatagcggcgccagaagtcataggggtcgccaaaccacatctccccaagtagccctgctcaagggtccacccaggacccactccctccagatgaacaactgctggagaacacagagaacaaagctggcttctcctcagtgccccacccccaccaacactctagaggctgcaggaagctggtgacttccctgaaaatttaaacagcccttcccagggagggggtgggataggaagtgctgggtgaagcctaaataccattttcttcagagctaggcaggtgatctgggttttcacctgcttgctgtgtgacctggatccaatacctcacttctgagtctcagctactgtatctataaaatgggaataaccctttctgcagtccctctgcagaggcagggagggtgttttggagtcatcatcacaacagatctgcctcactgttttttgttttgttttgttttgttttttgttttgagacaaagtctctctctgtcacccaggctggagtgcagcggcatgatctcggctcactgcgacctccacctcccaggttcaagcaattctgtctcagcctcctgagtagctgggattacaggcgcacgccaccatgccaggctaatttttgtatttttagtagagatgaggtttcaccattttggccaggctggtcttgaactcctgaccttaggtgatccacctacctcggcccccccaaagtgctgggattgcaagtgtgagtcactgcacctggctatcactgtttttgttgttgttgttgttgttgttgttgttgtttttaagacagagtctcgctctgttgcccaggctggagtgcagtggcacaatcttggctcactgcaacgtcggcctcccgggttcaagcatttcttttccctcagcctcccgagtagatgggattacagtcatgcactaccacgcccggctaatttttgtatttttagtagagatggggttttgtcatgttggtcagactggtttcgaactcctagcctccagtaatctacccacttcggcttcccaaagtgctcggattacagacgtgagctactgcacccaacccgcctcaccgtttttaaatgggttaccacatatgtaaatagaatagctcaataaatattcactccataactgcaggagttaggggaaagggaaagaaggtaagacaaggtcaacagaagacctgcaccccagaaaatccaacccccatggggcacagtccaacgtgggggtgggaagaatttacatctttgccaccaaagaaacaaatctttgccccacagcctgggattaccagggcaaccctcaacgtgagggtaggggaaaacagaagaggggatccatttttcagggggaacatgcttgtcttggcagtttctctcctcaaagatcctgagacctccaaacaagaccctcgggccccggttggctggggagcgttgagcacgcccaaggaacgtggacacaagcccctctgtaatggtgtgcctatcaggggtcagggatccagcctggtccacggtgaccccggcgggcaggttcggcacagtttacttgctgagcgcttacagagtgttcagtgcggtttaaacccattcactcctctcgacagcctcaggcggttgaggctgttaccatcccattttacagatgagtaaattgaggcacgtggagcgggacggtgaagcgacttgctcaggacctcacagcactgctgcccctggttttgtctggactggaggtagccggagagccggggcggctccgcacgcgcgcgggccagggcagcggctggagacccaggggagccggggcgcagagccagaccagccccgcccccgcgggcccggcgcagccaatgggcgcccggcccggagtggggtgacgcggcgtcagcgcgtaactcccgggagcccagccctgggtcacatgcgccgcgcccgctctacccgggaggtagggaggggcggcggggacaggctgggctcagcccccagtccagacacctggccaggaatgccgccaggtgcgcgtcccgggcaccggaagggctaacacgggacagccccacccgggactgcgtggcgcgcccagagcggaggattccttccaggtcacccagcccggcccctgcccgacctcggcgttgccaactgggagataggaattcgcatctccccgcttcctctccaagcctcttagagactgagaggcagcttctgtgggtttcgagccttttcgggcaggcgtccagcacgggcagggcctcttccaggacgcttgtcctgtccagccatgccctcggtgcccggagctcagccgtggatggcagggcaggcactgggcaggaaaactgggttgtccactctagccattgcctaggctactgaaacccctccccactcccagagcccccctgcccccctgcccccctgcctggccctgcatatccttcactgctgtgggagccaagctgggacctgcccaggttatggcagaggggccaggctgtgggaagagactgctcagagcctgagtctcccctcccccacttctccatctgtatataatggggtcagatgactgttgacatgggtgattctggtcctagatgacgctcgtggtctcattccagcttgggctctgtggtgagctgggcgagttctttccagccctctctgagcctccatggccagctttgcccctggaggctcacacccatgtgggcacctgcaggcttatcatgagtcactgaacacaccctctaccaaagagctacttgaaccccaaagattgctgcacagtgaggggtgtagctcacaaaggctgaggaagactgatacctgttccctggggggtaactggctgtttgaggagaggccaattgcatattgaatggggtgagtctagccggcaacagggagagtgaggaaatcaatgtaataaggcccctgtgggcattgggtttaccacccactacaccagtttaccgatcaggagagtaaagaacagagtgagacagtgacttacccaacacctacagttaagcctgcaaccctagggaggaatggggtggacaggaaatggcaccagacaatggagtccactcaatttccggaagcatcctacttactccctagtgctgagagtagagattttgcgtcctggaatgttgagggcctgggcttggaggccctggacagactcctctgaggtctgccccaaaagctctgacagggactcctgtaaaataaactgatggcatttctgggtgggtcatgcagacctgtccaaggcctcaggttctgccctcccgctgcccccaggacccaaaggagacctttttcttggaaaaaccacaggctcccacaatgcttccctcaagtgtgcagcttgagtgccctggggctcagctatgtgctcagagcctcctctcctgcaggccctggaagagagctacaacacttaactggctgcagagtgtccttgactctgggaatagaaccaggctgcacattccccaagggcaggactggagcagccctgtccctcccctctggcaccagcctggcacacagcaggctctcaggaacactgctgaaagcacaagtggcctaggtgtcctggtgagtccacagtagtgtctcagcaccaatctactctccacagggtagggacagagctcaggcctctttcagtgcccacattgcctggtacagtgctgggggcacataatgagccaggatctatgctatctgtttaaagggacctgggtttgcagccccccacccccacttcaggagcccactccccttctcccctgggtgtgggaacctttatctcactccaactggtcagaaacagggctctgcagagctccctggagcccagggaggcaactggccagaggtagctgggtgccgccccttctggctacgactggtgatggcggtggtcccaacacggcccctgccgtgacctgactcctatcagtgggcaggagagcccctcctgagccacgctcccagaagggctgctgttcagggtaggtggggcagctttatctgctggccatggaagtggtgtctttcctgcccacttcatggacctgtctgggaggtctggctctgggttgggtactggttctgccactactccctgtgcagcctggggcaagcctacagctctttctagtcctccatgtcttcactggcacagcaagagtttgggaagatctccaggttcatcgggggtttggtgagtccaccctgacttgaggtctgtccttaagccccagcgaagggattaaagggccctcggcctcccaagccacttggagaaggcacagttcccacaggctcccacaatgcacccctcatgaccccctatgcctctgggcctgaggggcctgcttccaggaggacagctaccttacaacaaagggctgcaggtgcccacctccaggacaaggggagagggggaaggaagcctttttagaaagggagagcaggctgtggggatgggaggagacaggtttcttttggggggaataaaaatgttctaaatttggttgcggtgatgattgcccaactctatggatattctgaagactacttaattgtacactttaaatgggtaaattgtatgctatgtgaattatatctcagtaaaactgttaacaaagtgtgaagtctacctggcttggagcagcagttctcaaattcagtgcccagcacaggctctgcagatgatgcccagccaagctgtgggagtccagccgagggtgggggctggggcttagagggggtcaggggtggctcaggcctgcttgctcaaggcctgggtgccctgggcaagggtgagtggcctcctcctgcccatctgggacctggggtgagacctaggaacaaccacagcacttggtcctagagctctcaggcaggttgtagcaggcttacagccactcccaccgatgtcacaacctgggccacgcacaggaattttcctggccaggtaaggggctgctcaggcagcctggccactggggaagggtggactgagggtccccatggccacccctgcttaaataaagcaggtggtcaaaactggcaagccctttggacagtcgtagccaattcaacagaccacacaggcataatttgttcaattatttatttattgtggagtattttacatgcaagaacccaattagagagagggtatctggaaggagggccagtggggtggatggatgctctgagcctcgggtgcactgacccaccctccagaaccagctctgcccacagaaacacatgacagtgacaaaaacactaaacttctaggacgagtggacagcaaacgcgacattcaacacattcctcttttcagtagcccccaacaatcctgagaatcctcacaattaagtgcaaactttaggaaataaatatccgtccccctctccgggagagcctggaggtatggacagacagaagcagttctgactcgggggctgatggctgctccctatggctggtggccgcaggggaagcctgacttggaccccacagataggaagggctggtgacgggcactgggggaggcgagcacttcaggggctgacagacaatgtctctggggtggaaacacttctctctgggtggggaaggcctactgtaacccaagtgggtgagacgtccccaaagccgacagtgcagaagctcccagggaccactccagcagtgccagaggctgaagccaggctgcaagcaagtgctcctccacactgctcttccagagctgccccaggggctggcctggccccaggtgggcccatggcctaccccaagccatccagaaggctgggcccaactgagttagagatgcgtgtctgcgggggcccagggtggggtgtggcagcgggaaggaggggggcaggagcgtgagcatcggcagcagctgccctgcgagcatctgttgcccttgggccatgtggagcccttgccccaactctccgggctgggtcctctcctccccaggggctggagtgacagcacaggccccaagaccaccaggtggcatggtggggtggtgggggaaggctagtgaaccaaggcaccatcactcacatggaggcgctaatagaaagacaggaggacagacggatggtcacctttccctctagcccaggccagcaacaaccccttgaggctccaaagctccttgtcccatgcacgctggtaagcgagccagtcattctctcagcctggccacagatggcctgctcagtgcctggagactgcccaggcagggctactctgcagcaggcaggccaaaggcccatggtgccaggggcccaactgcacatagcgccattctctgccgcccagtggccaaaaaggtaggcaggagggaatggttagttttcacatctcagcaacaatgaacgcagaaagggttaaacacattcccaagaaaatattttgacaaaataaatattttaacctataatcaggtataattagtgcttataaggaatcccagcaataatttagtgtaattaagtatatactgtatctgtgatttctaacactcacggagaggctggtgggccttgagagtccaggtttcctgacagagccgcacccccttcctggaccaggcagcctaaggactgtgctccccagatggtggggtctgggagcagagatctcaggacaggccatctcgccagggctaagtggaacccactctggggcaccggggctatacttgcttcctgtgcaggcctcaagcaagagccccctctgcctacaggtggggcaggctacctccggataggaggtgcaagcaggccacctgaggggtggctccaggctaggaaggcaggtgacacttgtcagcatggccaatggcctcctgccagcccatacaggtccaccactccctgctgcccctggggcagccaggcctctccaatgatgcctggcaaccagctggcgctggcgctggagctggagcggggcagttctgggagtgggtatgaaaaacagttttgctgggggctccccaggagggcgcctatttcagcttcacgcactatggaatccctgctcctttcagagcctccaggctcctgactttttgggactcctggttccatgaggcagggaggctggctcttccctctgaggacactgggtctgggatgcagtgctgaggctgcggagcactgactgcccgaggtcggaccgcccaccacccgcaggcccagctctggcagggcctcagagacaacccaagtcacaacccaaaggcagccaaagggctggggcctctgggtgcacctgggccatcccagccaccttttctgcagctcaagtgaagccagctaacttcagcagtcttcacattcaagctggcctcaggggggtctgtctttgagaaacattgaggaggcaggggctcatcaagcatcagggagcagaaggcccaggcaggtgtggcatgtgctgccagagaggacagggctagaatcaggctggccactccacggaggagcttcctgggtgaacctgagcaactggagtgagacatcccagctagtcccaccctcagccagacagaggtttcctctctggagggagctggagggctgctagcctggcacagggtcctgggtcgggcagcacttgctcttcactggaatagttcctgttggtgctcagcatgacccccagctgaagtcgccatcctgaatgctccccaacgaccatgtcgctggtctcttctcccgtcaagcccagccccctttccctgcttggctggtggtctgggccgtcctgccaggtgggaagggctaactacaccatggatcaggaacctgtgctgacctaggcagtgcatgctggaggggacaggagcagactgacccagcgagctgggcccaagacacacggggatgcatacagctgcagtattctccttctgagcaacagcagcctggtgggaggtgtggggccaggtgtctggctggaccagggcctgggatgacccgagtcccttgcccatggccaggagacacaccagtgaggacacgggatgggaatacatgttaccagcccctagctgctctgcctgccttcaggatcagcttggggagagagtataaattggtggccagaggacctctgaggtgggaggaggccagactgtcaggagagtctgtgcaaggaggccaaggcctatgccagggagcagagcaggggccttagtgctgcccaggcctctcagtcactgggaacctccaaggatgccacaaagctgtttgctgctggctcttgaggcagatgtgtgaggctacggcaggccaggccacagcactgagtgtggcccatgtgcacatctgtgacacttccccaggcaagccagagcaatacctccagtgcaagtccctccacaagccaggaccaggtgtgcgggtgtgagcctgcagtgtgtgcgtggcagtttggtttattggtagtgtcgtctcagcagcgtgccacatggccaccatctgcgggctgcctgctgccctcccaattgtccttggccctctccctgcccagggagcctgcagggaccctcggtgccaggctcggctgctgagccagcttgggtgtgaagcctgggctggcagctgaatgatggagagagggtcaagaaggtgagagacccccaccatggagacccagcagagccttctcaaatgctgataagccaaatgtcacaaggtgacaagtccaaggagtgagaccaggcccatgagtgcagcacaccctgctcttccagagatgccacaaagccccttcagggagagaggggcccaggagggcagaatgcctgagaaggtcgctgagccaggcagaggtgagcacagggcggggccgggcgtgctctttctccatgggcgggtggaggaaagacagtccgggtggtctgctcaggaagcactgcctggggctgggccactctgcccgctcttcctgggaggaaacatgggcagaggggcccatggtgggaggggagagagtctctggctgcagttgtcccaccactcagagaaaagaagtggctgaagctggtcctgactagtgggaggcctgggagcagacacggtggcatttccatggaaacacaggtgtgcaggccgtgtggagctggggatgtaggagtggccagtgcccggtgtccacggggtgcgagcggggacccgccatctggggaggcaaaccacagagctgctcacagggcgaagagggcatcctctgaccgctctggcttcttccggccagaagggtttgaggctggggcaggagcctccatggggggcgaggggaggtcgggaaccatttcagcagctttggctctttcttcaaggaatttatcaaactctgcaatacaaaccaaggcaagggtcagggttggtgagggcaggccaccagaggaagcgcacccttccactccccagcccgtttcctcctctagggcaggcatgaagcccacctaggagcaggtgggtagggaggggttcgtgagctgcagtgtggggggaggctcctggctgtgcccagtcctcctgccctggagggaaaggctctggaaaacacagcccagagtgctcaccctaccgctgaccattttccagatcagcactgggttttgtccattttccagatcagcactgggggtggggcagggtaagctggaggggccagcttctgattaaacaggcaggaaccatcccacctaccccacccttgcccaccaatggaggactgaggagatgctgaggaatgcagtggggaggggggagtgccccatttctatgggcactgagagctagggagcagggtcctctgaagtttccctccctgcggagcggtctggccacagggtctggcagacctggggagaggaggacaggagcacggagaggcagatggagtggggcaagatgagcttggggaggcaggatgtgaagggcaggggatgtgggggtggccatgtgggagaactaagaccccgctgctcccatccagcccatcagctgaggcccaggagaggctcctcccttctggctcagtggcccaagggtgctgctgcgcacctccacaaactgcgtgtctgagctgggctgagcacctgtgggtcaggaccaggtggcaatctgcacccgctattcaccagctctgcaactttgtggaattgacatgttctttctgacctgtttcccaataagcgagataaatcacacttcccaaatcagcgtaagacctgggtgggacaaagccacccgtgaagcccatggctcagggcctggcaccagtaggtgctctggcagcgggggctccaagatgatgggggctggctcctgtgcagcctgcacagaggcaacaaaagggggctgtaaggccactggccaggccataccttcacttgtgacaccctcctccagatcatcacccttctgtgggaggagcagagaaaatgaaattagggcactggtccaagcactgcccgcccagccacctctgtctgcccatggccaccctaggacagcactgcccagggtagcctgaacaaaacttcctaattttccctgtttccagatttctgtaatagtaaaatactgctcttcttattggagaaacagaagctttgtttttaaaaaacaaaagcaaaaaattcaaacatgttttaggttttgatcctccagaaaggctggaaagaaaactccaaaaacggtgcaggctggttctccagcctgggctgcagagggcgggaccccacctttggcactcttgaggctctagggagaggcacagagcagtagccacagggggctgagcctgagcacacacagggtcacgtgtgcccaacacaacacccactcactgccagccacagggtttctgggaagacgctgttgacaccaatagctggaaaccgcatgaggccttgatggctcagggccacaaagcccacagcacagggcctgtcactcagtaggtactttgggagtggaggctgtgcctccagaagccatgtcctgcagcctcctgggagctgcaccagcctcctcccgtggcccagattatattatctgctgctggctcctcaaggagccatggaggctctgtgcactcaaaaattaaagtgcatcagacttgattttgtttggagaacatggtagtgtcttgagctcatggggttccctggggactggggaagagcagcatgtgcagggcctcattgggaaggggcaggatggggaagtgacaaagccctgggctgggctaggagacctgggttccttcctgactctaccactgacctgctatgtagccttactggacacatcccctccctgtctggaccctggggtcccccttagaagttaaggaccttggtccttcctgccttgcttctgtgagagaagcaatttcttttcgagacagccccttgggaaagatgtcccggggtgtgttcttcctccctgacacccaggcagctgccttctttggcaaggcatgtgtttggaaagctgaccttctggggaggaggcccagagcagccagaggccccaacctgaggcctgctgtcctggtgtgggaggtagccaggtcaccagcccacagacagccaggctgaccctgtggttaaagaactcaacaggctcttctgcctggggacaaggccccctacagaggaggcacctaggagggagatgaggtgtctccagctctgggggagaatccaactaccccatgactctgggcaagccacttcccagagtgcacttcttcatccgccaccctggccccctactgggctgctgagagtgaaagtgctttgtaaagaacagagggaggggccagcagttatcacatgcagccactgcagctctcctttcttgggacctgttgccattttcagatgcatagtatcctcatcttctagccctatctctgaggatggagacaatgggtctttggggcaggggttcttttacatcaaaaatcaggaagggaggagggggatgacagccaattaaaaacaaaagcactgtgtgtatacttcacaattaaaaaaaaaagaaatgaaaacaaaacaaaacaaaacaaaaaacatgctcccccaacactccctcccccaaaaaaccaaagcacggcacatacatctgaaatggaaaagatactggggggaaggcaagtgtgtgttttggagccagctacggctaggactgtgtgggtgaaggaggctgtgcccaaggccttgcccccagcacagttggcctccgcaggccgggaggccactgcagcacccacagctatgggctgatgtcggggaggaggggcagctatggagcttgcccagacctcccttctccactgacccagacaggggtggagcccctgctgatgctcccccaaggcctgtcctcagaagagcctctgccgctccacaccccacagatgaaatagaaaagtcgagtctcaccaggtcggtcctgagccacacctcaatgtcgtccatgacagatggctgcgcaacggggatctatggaggcggcaagcagcgggccaggcagcccccacacagccagcgaggggagacagaacaccggaacaaaggaaatcatcaacagcaaccccaaataaaaccaaaatgtacacagagcaaaaaaacacaattggcacagcacacaggggcaacacagggcagccacgtgtgagatggcaggtgaggaaagcaatgaggtgcaaatgataagaagcaggctcccggcagggccggcggtaaggaaggtggctgtacgcgttcttgaaatggagaactttttgactatgagtgtccactctcacattgcggggcctctcagcccggggctgcaaaacaccttctaacttcaggaaggcgctgccacgcaggctgattttgaactcagccactatgacagtccgctgtcaagcccaacccagggaaggccaagtgacagcctgcccagagcggggtacaggtgctcagagggcagggcagcaccagccccggggggatgcagggggtctgtttgctccgctgaagagattttgaaatgcgtcctggtgcatttctgagtggagaggggaactggaggaggtgcgtgctccgctgggctgggtgtggcctggtagacagaggcaggcacattttaccatcaacagaaacacagcaaaaacgagggctctgatgacaaaggggactatggggctttagtcttctttgtgtctctttaggggaaattcatgaagcagccctgaaagcaacagctccctttagtctcgtcctttcttccctgtgttcaatggctggctgtgcttcaggagtcaaagaaaccaagttcagctgagcactggggcgcagcagccagagccagggaggtgacagcttccaggcatactaaggtgtaccacggggttgcctgagcagtcaccttgcttgggcccctgtgccaagcacctcagggacagagactctgaaaaatgcacatggctaaaaaggtttaagttgccatcaaatatgacatgataagaagctccctagaagccatgttaatggaatgttggctcccagcctagagaaatgaggtgatgacccttaatcacctcctcacctaccctggctctgggaggtacccttccggggctcacttgcaagacccctatttctattacaaaaatgccagctctgtctatagctggcttcacccaatgccatgatctagggtaagactaaagtaaaaataagcagtaaaaggaatgcataccccagtgtctatcaaatgtaaaaaataacacgaccttcacaaagaaaaagaacaaagaacacatatcaccagcagtgatgtgacaactccagtcctgggggttgacacctgctgctgatggtgggggagggtggtttggggtcccaggtagagtccagcactctgagcaggtatctacgatgccaccagagctcttcactccctcagtgagctcagctggccccttgctctgaggaatgtgctctgtgtcctaacttcggacccaatgtgggaagcccacaagagcactttcagaaaggcccaagccagtcactgatcagattaggaagagtctgtgttgctcattatttctttgacttactggggagttaagaatgttgaattgagcagggcacggtggctcatgcctgtaatcccagcactttgggaggccgaggcgggcagatcacctgaggtcaagagtttgagaccagcctgaccaacagggagaaacccagtctctactaaaaatacaaaattagttgggtgtggtggtatgcgcctgtagtcccagctactggggaggctgaggcaggagaatcacttgaacctgggaggcagaggttgcagtgagccgagatcacgccattgcactccaccctgggcaacaagactgaaactctgtctaaaaaaaaaaaaaaaaaaaaaaaaaagaacattgaattgaaaaggtatcagggagtcttatcacccagacatgaaacctagggacaggaggcatgtgggtcctcactggggggatggacgcacaaatgactgacagatgtgttaacaatgcctaaggctggcacttccttgcccttgcccatcaaaaggcagtagggtacactgctactctgtgcttgctggcaggccttctgccttgagacattcctggaacaggacacaccagttatcatgctctcaatgactgtaagtcagaatgtgtggcctctgggaggacgcatgccatgctgagtccccaaaactgaagcttagaaagtcagcagcatctccagagagaaaatagtcccacactagcggttagagtgtgcaccagccctttctttacacctgaccagcttttgtccacttagcagaaacagactagatgtcctgagctttccaatgtgttgcaaaagctacaacaaagacattaaggggtcaggggccttaaaccttcagatttttcttgtaattgttttgttgctgctaaagaacaaatcccttgaggcctggggtcatactttaattttcttctttggggataaatcttgagagccaacatgctcagaaaataaacaatgacacttaagaaattcctcacctcctcaaaaataacttcccaaaagctggctcatgggaacccttttcttccatgtcctagatttttccaaataagtagtatgtttatggaatggcatcctccagaccaagccctagagggcacgctgaggagagtgcactgggtggggtccatctgggccctcacactcactggtggcaggacctggggtgagtcgctcctctctggaccccactttcttcaccggagagctcctgagtttcttctatcctaagaagccttagagatttgggtggagaggcaggagcaggggacagaggcctgagcaatgcttggcctcaatttcctcatctgtgaaataaggcgattgctagattgtatttggctttcaattcttatgactcagaaaccttaactttcaggttggtgcttctgttttctaattcagaaacccagggatgtcagaaattatggaaactgactcattacaatatagaagccacttggcctcagggcgtgaaccatggtggagcagggtgatggttaacagttaagcttatataacgtaagcttaaattgactttcttgtggccagacacaaaaccttagctatctaaacctcttgtcctggtaaataaatgccttgagtattataacagggcaaagttccttctaataatgtaggtgctatcagactcagactaaacatgtacactgcttggaaaatatgaaccaaagaaactgtgggaggccgaggacgcgctccttgtcaggctgatgggagggaagtggggccctggttggagcagggggcactgcgctgagtcttaggggactctgtttcttccctgcagctttgggcaagacaccaggcccttaggaggcctcggtatcctcatctgtcagactaggggctggcccagcagattcctaagaaggctgttggctctgatgtgtcatagttttatttttatttttatttatttatttagttatttatttaattaattaatttatttagagacagagtcttgctctgttgcccaggctggtgtgcagtggtgcgatctcagctcactgcgacctctgcttcccaggttcagataatccttgtgcctcagcctcctgagtagctgggattacaggcgtgagccaccacacctgcctaattttttttttttttgtatttttagtagagacagggttttgccatgttggccaggctgatctcaaactcctggcctcaaatgatctgcccagcttggcctcccaaagtgctgggattacagatgtgagccactgcacccagcctgacatgccatagtttcagcattttcttgggcaatgatccaagctgaaggctggtctgagggatctgaagaagcgtatgagttggaagagagggacagaaaggaagaagacatgtgaagagagaaaaggaaggaagctagcagaggaatgccctccaatagagactgctgcctgaagctcagcccctctgaagataggtaggccaggctggcttggctgaggcagtggttagaccagccctgcccattttcaaagtccacagacatcttggatgtcagaagccacaggttttgatctgagtggcaggtgagccatcctgctgtcagctgattctcacttggaactgcaggcaggggcagctctgcctcagggatcaggagggagggttgcctgcccaagggggagaggcatgtctgtctggtactccaggggttaggattatccttccagagtaagagccttgggggcctccaggtctgaggagggagtcccgccctccaaacccaagcctgggttttggcagcagcattctttactaacctacctctgttcttgttttgacttagattctctcacatgaggatattttcctggctgcaccctgcaaaagggagacacccctagctgatcaccagccaagagaggcaaaaagacctcacactagagaggccagggagggagagcacaagcctagcagtctccctgagagccgcccggccctagcccattgacaagtctcatttctcttcaaccagtaataagcctggtggtgtcagttaacttctgtgttggctatccacacacctgagtcccaggagcataagggttccaacagatgctcctctgcagcttcccacagccccatgcccacaaggaaacccacctgtccagttttcaatgtaacaagaacaatttctgtagctcaggtgtactatttccagagaagctgtgaatcccttcctatgtcacttcaagcaccaccccactgggaccaagtctaaaagcctttgatctcactcaatagtacaaaaagtttccaagtaaagaatttgtactcaggaggcttgaaaagactcaaggtttctacactatgggaaataaggcaaagcaattaatatttgttgtaaagaaaaaaaaaaaaacaaactgcagtcagtcaggcaagacaccaggttagctgttagttaggtttgtttctgggaagttagagactggagctctacgtgggacctggcagtggcgaggcagtctgtgtgggcagagacaggcaccaccaccagctgccaaggccaccctcaggggagtttgtgtgggcagtatccttttttgcaggattaataggcacaagggcatgtgggctggatcttcccaatgaatggacatggtttccagaagccctgctgcaaaggcccctgacatgtgggccagaggccagcctgtccctgaagaagcaaatgagaggcctgggccagcacatctctctaagaatgggcttggggtctagtggaggaactgccttctcacgcagagcagcagtatgctgctactatgagaggtggcaggagacctgcccaggctgacagcagagctgtgcagagggcaccagcccaagctgggtggcaggcagatgccccttgctcccacggctctgggtgatcctgcatggcccaagttcctactcactggtcacgctttgctcaagcaggtggaccctgtgctgcttgcagtctaggacctgctggcctttcctctggccacagcctagcatagcacactatgggcagttatgtattcctctcaccccaccccacctggagggagaggcacatgtttgcactgctttcatcatctttccttctctgcattctctccagctcaggctccatcacatgtaccacagctttgggctctgctagaggtgaaatggtcatcccaagacatacagcctgagatgagctgaccctctctccatgcaccaggctcaggccacctgaacagacaaggcaggagagacccttgcaggtctgtgggccaggaaagctctgctacatgagaaccaactgtgtttacaacattgaactcccctgggctttgttttctttttactctgtttctactgtgtttatttttttatttttttgagagggagtctcactctatcaccaggctggagtgcagtggtgcaatctcagctcactacaatctctgcctcccaggttcaagcgattctcctgcttcagcctcccaagtagttgggattacaggcacatgccaccacacccagctaatttttgtatttttagtagagacagggtttcaccatgttggccagaagggtctcgatctcctgacctcgtgatctgcctgcctcagcctcccaaagtgctgggattacaggcgtgagccactgcacccggcctgtgtattcttcaagaggtttcaaatcattttgacggacttagtggatataagcaactatattataaaaatctgtcaagcctaggactgccaaattcacaggcactgggctacagagggcttccctgactggtcagatgctttgagtctgttcccttagaattgttccctcccaagcaaaagccacagtaacttgtgctcatcctggaaaagtgaatactgctcggagctccggagacagtaaaaggaaggaaaggaccctctcctcatccctgctaatgtcccagactcttaaggcctggggacagggaggtatttttgggactgggaatctgtggcttacagagattatgcaaaaataggaggggaaatttggcacccctgccagaaagaaagcgtgtggccttgtactgtctgattcacaaaggctcggcaggtcacaagaggaagacatgagctgttacacaggtaggggctggggtggacagcaggcttggctcggctggtgactcctcaccattccttgggttataagccagctgtctatgggctccaggtcagactccccacctctacctctcttctgggccgaggacagaaaagtctcagaaagaaaagtcacagcaagacccatgagaaagaagtcaatagcacatattgtggaaacagaaaagtcactcttcagacgtgatcctttgccacgtaaggaaatgtgatgccctgctcccaacctccaccccagcacgtcccccttacctgcctggaaaaaagaagaaaagtttagtaaccaagaatcccaacaggataacacatactcatgccaactactcccgtgcccttggaaaatctccaggagatcacagaaggttgaccagagccgcttctctcaattacggctatcagggttgggagggggtcaacttttcaaagaaccagcttttacaaaagcaattctacttttttctttttcctacattttttttttctcttttctagtggcatgtgtattctttttctaaactcttgaatactaaatttaggtgtattattgccttttaaaatatttatttgagatgaggtctcactgtgttgcccggactggtctcaaaaactcctgggcgcaagtgatccttccgcctcagcctcctgagtagctagaatgactttttctttttctctttttgagatggagtcttgctctgtcacccagcctggagtgcagtggtgcgatctcggctcactgcaacctccgcctcctggattcaagcaattctctgtctcagcctcccaagtggctgggattacaggtacctgccaccacacctggctaatttttgtttctgtttttttgagatggagtctagctctgtcgccaggctggaatgcagtggcacgatcttggctcactgcaacctctacctcctgggttcaagcaattcgcctgcctcagcctcccaagtagctgggattacaagcatgcgctgccacgcccagctaatttttgtatttttagtagagatggggtttcaccatgttggccaggacggtctcaatctcctgacctcgtgatccacccacctcagcctctcaaagtgctgggattacaggcgtgagccattgtgcccggccctaatttttgcatttttattagagacagggtttcaccatcttggccaggctgttcttgaactcccacctcggcctcccaaagtgctgggattacaggcgtgagccactgcgcccagccctgggatgaccttttcttgactgacttggttggatttgatttgtagaggtgcggctacacgattttctcccattcattttattttatttatttttgagacggagtttcactcttcttgcccaggcccgagtgcaatggcatgatgtcggctcactgcaacgtccgcctttgggttcaagcgattctcctaccccagcctcctgagtagctgggattacaggcatgtgccaccatgcccagctaattttgtatttttagtagagatggggtttctccatgttggtcaggctggtctcgaacttccgacctcacgtgatccgcccgcctcggcctcccaaagtgctgagattacaggcatgagccactgtgcccagccttccccttttttattgtgttcttaatttctcccttggcctcgttttcatttcgaggtcagcatggcttgggatgggacaaggtaacctgaaatgctgcaggtgggcaagaatatgtgtagacacacacagacacacacagcccacatgctctgctgccctgtatcgctaaggctgtggccatggcattgccccatggagcagcaaacatgaaaagcaatctgatggccgggcatggtggctcacatctgtaatcccggcactttgggaggccaagacgggcagagtgcctgaggtcaggagttcgagaccgacctggccaatatagtgaaaccctgtctctagtaaaaacacaaaaattagccggctgtggtggtgggcacctgtaataccagctactcaggaggctgaggcaggacaatcgcttgaacctgggagaggaaagctgcagtgagccaagatcgcgccactgcaccccaacctgggcgccagagcgagactccatctcaaaaaaagcaatctgcctactgctgggtggaaaacctgctggagtcatcaggacctttgaaaacagggagctagtccaagccacacacacaaagggtgaagggcgggaagtcactcacatctcctgggctcagacccaggcctgggcgctgataatggcaggggtgcagcaggacacaccctggcatggacaaggcaggtcctggacccagagtgagggacaaatgaggtcagcctcataggggcacaacagggctgctcccagtgcaggccagggttggccacgaggaggggatgtcctcaccaggcagtatcctggtaggcccctggctgggctctctaatgcccacgctggggcaggtgggaggacattctaagtaatgggagaatcagagccatgagcactgcattgattttgagtgtcccagtctcaggggttcaggtggcactgcccactcctgtggaaaggcacggcactgaggacccaaggcagccagctggctcttctgcgccctctggtgaccagtgcagagggatgcatgccctcagatccaccaggtgaagaccagcatggatgagggagtgagtcccttcccccaagaaggagcatcccgtggaaaccagcactgctgcctgcctgggcccattggacaggggcttcagaaggctaaaaattgggacccagtaagcaaacagccctttgcaaaccttcctgtccagtggacagatgatcactgccctctctagcccagctgggggacccagacaggagttccagctgttgtcggcagctattccaaggaccctcctcctccctgcccctgcaaacagacgtgcattcatacacatttctttgttaggcaaaaacaaaaatctcatgagaagcattaagacacacattctttccccttcagtaatccgaaattgtacagaaagcatggttatgtttggggaggcccaaacacataccattccctccacttcactgtgccgcaccccctcaccgccacaggacaccctcccagccaccacccaactgcaccagctctgtaaacaaaccctggctctcgagtgccttctaatggggttggtactgctctgctaggccagtgacaaatggccatcagagatgtggctcgggtcagcattgtccttcctggtgcaggccatggttttatcagagcactgaccaccctgtggcactgtaacaggtgaccataggagacttgtgcctggagaacttggggccactgtggtaggaacagcaggggttctggaaatggacactaatcctaggattggaaccccagcttgctgtctgctctctgggtgtctcagcctgtctcccacctgcctgggactgttttctcttgggtggattgggaagctcatgtgtggcctcatctcacggggtgaggtgaagactcaatgaggcactacctgggttccacggggtgtcccccgtgggtctctcccccagggtgtccctgccccctgtgcaagccagtttctgctgaattacccagccagctttgccaaaccacctgactttccctccagaagactccaggcagaaaaacagggttaaagacctaccccttctgaactctgttttcgattgtctagtgcagaagcaagtcctccgacagcctgaggatcctcataggttaccctggagatgaagaagcagcacaagcagagttcattttcctccagtggtcatggagggatggggtagtggcctgtaatcacttctatcctatggtccttcctcagatgtccttggaaaaacatttcctgaaaccttgacattgagcagaggctaagggctcatgttgtctgtctccctgcagtggatgctaggaggcctgggtcctagctcaggctgagccactaatctctgcgatctcagattttgtgcacctcaacatccctctcttgagtaacaatactgagcatctctgaagctgaatgtccaaagtgccctaatactcctcagagggaagactagataaacacaaagtaacattaattcttattttattagcagcagcctcagtggcatttgacagggaaggtggtctctgggacccgggcctgtcactgattatgggaggtcttcctccactctccgactcctttagctatatctgttttacaatcaacctttggtggtgaagggtacatgggaccttgggtttctgcttaccctactgagccccaagcaggactcagggtgctgagtgcaccaagatgctgggtccctgggaaaggtgggaaaaagtgtgtttcacccgcctttaggctgaacagaaagctcaaaacatgtacagtgcctccctgagatgtaggagattctctcttttggaatcaactccctgaattccagatggctcatcctagccagagctgctatcagaggagcctctgctctgaccacttattttagtcaggaaaatctcgctgtaaggaatgggttcaccctgcatggctgcaccctcctgcttccaagcttctcctgtggatgaggggccaggcagggtggtgtctgcagcagcagcagcatggggagaaaagagaaaagctgtctcttacaactgacaggagaaatcacactccaatcaaccccaagggcaggagagtgtgtgtgtgtttgggggggtgggggaggaggtgggcagttggtatttattcagtatctgcatctaatgccaagtccttacagccatgctttaaagttcctggcagtcctggacatggtaaataaatgcctttttgtgctggcctgtgaccaggcatgggtcaatccccccaatatctttagagagccactaaaaggggccccacatacgtcttgcgctgctcagccaaggagtttcctctcgtctgggcaaacatgtcaaagccgtcacggggattacattgctggagtgaactgagggtgccactgacgctctctgtccccaagtctgtggcaacaaaacaaatgggtggcagatgagaacaaaatgtagactgtagatctgatgaagggcccccaagctaggacgccagccaggtgggtttaggttccatggggagggtggggcgggactttccttggtactcccagtgcaccacatgccggaggagccagggcgggccagatgggggacagaacagccactgcccctcaaactgctcaaggaggcgaaagagtcataacaaaaaagagattgctggggtgacaaggcagggactggcgccagtgcacctgcagattttccataatgcccttctcgcttgggctcctcattaactcaatcacaatgtccaaggacctggaacatctatttattcagcaaatatttcttaggtacccaccatgttcagagctagatcttgagtagaccaaattgaatctgatatggtcctcagcttcaagaaggtcagagtgggcaagagacaagccacagcagtgcttggcttgagacatcaggaaagactcaaaaccaacacaacagtgggtctgtaaggataatgaggaggatgctgtggggagaaggggaaaggcagataaaaaggcacggggtttggaggccagggtgtgtgaagtgaacaacgctcacaggaaaaaatttgtggaggaagtggctggtaatacctcaaatgccaggtaaaggagtgggtgggaagacactagacttttttttttttttttttttaaagagacagagtcttactctcttggcatgatcatggctcactttagccttgacctcccgggctaagtgatcctcccaccttggcctcccaagtagctaggactacaggtatgtgccaccatgcccagctgttttaaaattattttgtagagacaaggtctcgttatgttgcccaggctggtctcaaacacctggcctcaagtgatcttcccacctcggcctcccaaagtgatgagattgcaagtgtgagccaccacccctggtggacactacacttttgttgttgttgttgttttgtttgagacagggtctcactctggatgcccaagctggagtgcagtggcatgatctcagctcactgcagcctcaacctcctgggctcaggagattctcctactgcagcctcctgagtacctgggactacaggtgtgtgccaccactcgcagctaatttttttgtatttttagtagagatgaggttttgctatgttgcccaggctggtcttgaactcctggactcaagcaatccgcctgccttggcttcccagagtgctgggattacaggcgtgagccactatgcctggcctactataccttttttaagaagagaggtagcagaatccaatttgattttttttttttttttgagacagagtctcgctctgtcacccaggctggagtgtagtagagcgatgtcggctcactgcaagctccgcctcccgggttcacgccattctcctgcctcagtctcccaagtagctgggactacagccgcccaccaccacgcctggctaattttttgtatttttagtagagacagggtttcaccgtgctagccaggatggtctcgatctcctgaccttgtgatccacccgcctcggcctcccaaagtgctgggattacaggcgttagccaccgcacccggcttttttttttttttcttttttgagatggcatcttgctctgttgctcaggctgcagtgcagtggcacaatctcggctcactgcaacctccgcctcccgggttcaagcgatcctcctgcctcaacccccctagtagttgggattacaggcacacaccaccatgcccagctgatttttgtatttttagtagagatggggttttgccatgttggttaggctggtcttgaactcctgacttcaggtgatccacctgccgcagcctcccaaagtcttgggattaccggtgttacactttgaattttaagtattaaatctggcagtcatatatgctggactgactgaaggcagagacatctgttctgatacagaaatagtggctacaaatatacgaaatattgagaagctacaattacagcaactgatagccactagaagtttaactcaagtcaaatgaaaggaaagtagacgagaaatattttttaaaaaggaaaacagaaaagcaagacagaggaaagaattttgagggccatgcttattatttcaatgttataatttcatttgttataaattggtatcatccagtataaccaatgtgctagagtcatatacacactttgaatgtacaaactaaatgaactgtggaaagtggtgagtttcttttaagttccagacaatggactgctttaggctgatggtaaagttcaaggagagcaaatatttcagtgctgctacctcctgtttccaagccctctgtagatattgacaatcaatcaatcacagacttttctaagccctgatgtggcttcagcatcctcctcaaacctgtgttccaagaagccaaagagctgaaacctatctgccctccttgacctagttaatatttatttatttttttgagatggagtcgtcccccaggctggagtgcaatggcgcgatctcggctcactgcaacctctgcttcccgggttcaagcaattctcctgcttcagcctcctgagtagctgggactacaggtgcccgccaccaagtctggctaatttttttgtatttttagtacagacggggtttcaccattttggccaggctggtctcaaactcctgacctcaagtgatccacccacctcagcctcccaaaatgctgggattacgcgcccggccttgacctagttaatattgaaaaggaaattacttcaatcatagggaatgttccatataaaacatggcaggtgacctttcttttttttttttttttttttgagacagtgtcttgctctgtcgcccaggctggagtgcaatgatgcgatatcggctcactgcaacctccacctcccaggctcaagtgattctcctgccgcagcctcccgagtagttgggattgcaggtgcccaccatgcgcagctaatttttgtatttttagtagagactgggtttcgccatgttggtcaggctggtctcaaactcctgacctcaggtgatccacccacctcggcctcccatagtgctgggattacgggcgtgagccactgcgcacggccgtgacctttctttaattcattggaatttcccccatccctgctttccaacatagattttaaacttcaaatttagggggaaaaaaggtatgaattgaaagtaaggtggtacaactggctaggactcaggaatacactttcacatgtatttcccaaaagactctctttgggtcttccaagaaagaaagagaggtggcctgcaagggaggccagtggtaggaagtaggtaggcccttttgtccctgtgagacactcacctaagcctgcaagctgggaggagagggaagatgggggcgctgtgttccccaccattgggctcaccacggctggagaccctggccccaggtctattaagttgtcttcggttacttcattcagtacctgtcagaacatgagattggccataagccccagaaccctggagtcaggctctgaggtagaagctggcaaggcaactatgcagggttccaagaagaaaagtatcagcgctgctctagtacagaagcaaggccacttcccccacctgccttccaggtccatggtgggcctggatgtcagtgagccctgctcactgcctcctccccgtccccactagaaggaggggttgctgagtcaacagtgactgtcctgggagatgcaaacttagggcttgcttgccaccttcccatcaggggtgcctgctagctctgccctagtatcccatcaaccagagcttgcctcttcaatttcccaaatatttcaaaaccagttagaaaaactggaggtctctccagcctccaaaacgtggaggggtaggtctggcctcaggagatgacaggattctgaaggaatacttactccattactggcattttgaacggatcggccagacctgtatcgttcgaacctaacaggggaagggaaagcagaagtaaggagagaggatgcctgtgatatggccctgtggggtgctcactagtcctatgaagaatccctgggaccaagaccagccagtcccacctgggggctagggagtgaaaccatatatcaactctgccacggcttcctctgtgtggggctccccctgagaggatcagcttctcacccagcacccagagtgggcatcagaaaggggtggtggctggcccatcatggaggtcattgtgagtgtccccagcctctcctcacacacctgggccctggagggagggtggcttaaccaccttaccttggagctgcagactccctatttcatagggctgtgttcaggagcaactagctagtgttcctaacatgctcccaactcagcctctggggaaagggggtggggcacacatagggtgggcaccagcaggaggaaggcggacgcatggccctggctacggcctggggaaatgctcgccagtagctgctacagagaggcctgggccagtcatcgaaggactgctaggagggtggagtgagtgtcctctgcacccagtcaggcagtgcagggggagttggctttgagcaactgtcgaaggccaggtcatcctcctgtcaggtggggaacggaagagtagttatgaggtgtgtgttggggtggggcagaatagattatgttctgtatcgtatttaaaaactccaaatgccatgggcagcggtagctaagagactttttccagctggagccttagacacccagctttagtgagttatgctgctccagatttgtctcccaacttgctggggtcagcagctggtgacaagaaagagatccccaggaggaatgatctgggtaaggcagtgagtgtccactgtggttttaaaaacgacttgtgtgttttttcaacagtggtctacaaggagaacaggaatattaatacatctgaaacaattttaatcctggggtacctttcccacactcatcttcaatgaacaatgagtatcatcaaagacactctaaccaggatagcacttccagccaccagccccaggctttgcctctgaattatgtgtaatgcttggactgggagactcttgggtgaaaatactcatattagttagctcctgttatgctttctagcagggcttaaataggtttaataggttaaacccaagcccatttaccatggagaaactggaatcacatggcaagacaaaggggcctcgggctgggagtcaggtccccttatatctgctcctgttctccaactgatgcactggggggtcctggggatgcccccacacttactgcagaggtttattcacctgtcaggtgggcacagagccactggtgtgtacttccgtagtcaaaagatgagacaaggcccaaggctgtgacagccataacaaaatcaccctttaggtccccaaagggtaacgcaaatgcaagcatctgtcccactcaccctaactgatgccaggtccttgtcctcctgatgaatccagcagtaggttgtgagtcagctggtgcggcagaggggaccaggaccttaaatctgcaggggactcaagccactgtcctgtcctctcaagcctcatctttaaggggaaaaggttggcctgatcatggtcctttctggtccttatgctgagtccttcatgaaagcccagtgtgctcccatcaggtgatgagatgggaactgtgcttgccattattcctcctatttaaaactaggtctaaataagacattttggactttgtcctgagggaaggctttggaaatgaaaaagaatttgcaggtttgttacctcaaactcaaaaatgatttggctgcagaaagaactggaatgaatgtgtgcacgcttccctaagcagcagcattccggcacttacacccgcctgcttcccctgaatgctctagataacattgacatttgcaaagggaaaagctttttttcttttttctttttttttaagatgggaaagaggaaatcctttttcttactagagattttttttccctttaatccttttcaaattcaaaggatcatcaaaggagcaggtgcagaagctctggggcccagaggcccccaagtgctacccctccctggggctgggggtggcggggcagtggggaaaggcagagcagcctgaggcttacaaagggcagagcctaattctgcacgtcaacttcctgctgcttctgctgctcagttcccaggaggacaagaagcatttttcctgtcagccgggaacaaattagcatctctgatgagtattttccaactctaatctctctccctctccctctctttcctttgtttatgaaagaaatccctctgttatggcaacaatcttttcaagggaaaaaaaaaaaaaaagaaatccggctcccacctctcgtatcgaaggaagacgttgttgaggtcatcgttcacatgcagcagctcctcggtgacctcctcattggacacgcgggagatgagctccacgatgcgctgctgcatggcccgacaggtcctgttgagctcctagggaacacatgcacctctgggtagcctgctgggtgtgcttttcgtcacattctatctcctttgaaaaaatttgtactgattcttaaaagtcacaaaaggagtacatgcttgttcataaaaccagacatgtgccgaattcaaagtagaagttccctcttcactgcctgcccctccttccgcagaggaaacaagtactttttcagcagacaaatgtccagacatactgttgtatgtatacaagtacatgcttgtacaaatcattaaaaaatattaaaatgtgattctttccagattgctttttctcaacaaaatattccagacaccgttctccatcacttggtacagactgcctcattcctttctgtgtgtttcataatgtatctcgccattcttctattgctggacatttagattgtggtctctctttttgtggccaacctaaataatgcagcaatgaacacctgtacacacacatgcatatgcacttgggcaagcacttccataggacaggttccttagcagggaaatttctaggtgaaagggtatggtcatttataacattaattagtaatagtaaaaggccctccaaaaatatgacatcagtttacttacacttccagcaacagcaggagtgtattttatgactgcattaggtatattttggtggcacgtctgccactttgccgagacctcagaagcccaggcagctccctggctggccgaaagaggaaattcgcacacccccggttgcccctggagccctctctacccttagaagcaacatccccgtgacgacagagccttagcactttatggcctggcttccatgagccttccctgttccagaacagcagacttactgatgcccttgttcaaacttgcttacagagctccgtcaattcctgccaggccccttgccatctcgatgccagactgaggatgctacagaggagggagctggcaacactgccaggctggcccccaagcatgtgaccaaagctacaagtcccagtgtgccatacagggttaaagcagagggaaatgctgttcccacctacctgggcactggagggtgccagtgagttaaggggataagacatgaaggataagtctctccttctcacagctcagcctcaaaacgacttcattttgaaaccgtttctggtagaagtaactgatttattcacaggagacacggcaatctctctttagttcctcatattgtctcataatcttgctagcttggctacagggtcttccttcctaccacatcataaactcttgagggggtgttaccatttatccactcaaggatgccctcaagccccgcactgagccacacacagtgaaaaagcccagtaatcatctgctgaacacatcaccaaggtggtcaatcagccagtggggaatcaaaggcatcccccctgcatgtccctggtatcctgcaacacagcactcacacaggggctgggcttcttatctgccctcccgtctagactgaagctccttgagggcagagaaggtatttccctggtacccatgacacatgggaggctctccccaagtacttctgagagaattaattaatgactctaaagtattcagaggccggggccaggtgtggtggctcacgcctgtaatcccaaaactattggaggccgaggcggatggatcacgaggtcaggagatcgagaccatcctggctaatacggtgaaaccccgtctctactaaaaacacaaaaaattagccgggcgttggtggcgggcacctgtagtcccagctacttgggagactgaggcaggagaatggcgtgaacccaggaggcggagcttgcagtgagccgagatcacgccactgcactccagactgggagagagagcgagactccatctcaaaaaaaagtattcagaggccaagtgcggtgcctcatgcctgtaatcccagcactttgggaggccgaggcaggcggatcacttgaggtcaggagtttgagaccagcttggccaacatggtaaaaccccatctctacgaaaaaatacaaaaataaattgggcacagtggcatgcacctgtaatcccagctattcaggaggctgaggtgggagaattgcttgaatccgggaggcagaggctacagtgagcagagattgcactactgcactccagcctggggaacagagtgagaccctgtctccaaaaaataaaaataaaatataaagtattctgaactcttggtccccgcaaattaccagctcagttatccacatactctcagtcttctcagcactcttcactcagagaatggggaattcttgttcatccaggatctaattttccctctctaggactcatcccaggccccactgaaccagcagtaagcacttataaacatacagacaagtgctagaattaataagaggtgaatacgggatcttaattgcaggggacactactatccagtaaagagaaaactccacaaaatacccactctcctctgttgtgaatggctcatgtccccaggccaggcaggagaggggctctcaaaaagctgcctgggccttggggcctgccagacgtggtctggattgccaggcaataatggccacaggcgccaatggacactcacaggtcaaaacccagtcacaattactgtacacaggaaaaccaacaacacaggggaaacactcattacagaatgaagcatactcaggagtgatgcagaaaaccaaggcaggcccttaacattaaaacaaacaaaaacaaaataaaaatgtccaaacttatgaaagaaacaatcacatagatcacgtgaaggattccaacagccaggactgaagtgaacaattaaaataattatagtatttctaatagattgttaaaacacagtgagcatctgttcagggctgacagaggagcacagatttaggttaactttgacagaccatcctcccctgcttcctaaaagaaaaaaaggatacttggccaacacttgggcagtagatttaccccatactttggaagaagcaccagagggagacctggccaaagtgtgcaggatggaaaagggaggctgggcagtaggacagagaaaagaggtcaaacaaacttctgcctctctgctctgccatggactgttccgggccaccgtgcgggtctcctccccagggatgtggacgtgccaacacacatgaggaccgagccaggcactgctgagctcctctttgctccagcgctccaggtgtctgcggaaaatctctgatgagcaaaaggatctcaagtcccagctcaggacccaccccctccagcaaacaggcccattacaagaaagtgtggcctctggggcttgtggcctagcagcaagccctggctgtccttggctggggagggagaaggaaaaaagtcaatcacttctcatgcaaactgcaggccaatcacaaggcacaggacgtgcaagtcaggggagtgtggcagtaggttgtgggaaacagatccaagttaccctccagaagactggggtatcagcacctaaggcccacaggccatcttcaaatacacctcagactttccagaatataggtggcctcaggcacttgccacactgcttaagggctcctgagaagttggccatctgcctgcaatgtcccttatttccttttccatcaaacaaactcttactcatccttcaaggcctcaggatgtttccccactccagtattttgtcataaaaattttcaaacatacagcaaaacaggaagaattttacagtgaacagacaccatatgcctatcacctagattgtaccattaacattttacagtgacagctttaacacgtacttcccatttattcatcttcctgtccacatacaatgttttctggggatctcccaccaccccaccctcctcaagactcccaaagcattcaacacactccagtctgtcatcagagcccctctacaaaaacctccagcaaggggtgaccagcccccatctgcactccacacagcagaagccccgaaacaaagagtaggcctcaagggtggttcactggatttagaggagaaccaaaccagattcctcagtagactgcaggaagtgtctcagaaacatggctacaaatactcccagcaccggcggcctgatggaagggagcaggggttgatgtcagtctcctcaacagagccctagccccagctgggtgctggggacgaagctgcaggcagcaagtagcctgtgactggatacactctccaagtctccagtcctctccaggcctgcttctccctgggtaaaataagggggctgcattcatgaggaagtttttctgcagaaggccactgtcatgctgcagcggcctccatggcacggggccagggcagctgaggctgctctgcttttctcgattttaaacactgccattcactgtaaaattttatttgtggaggaaaaggttccatactttatttacttatttacttacttatttttttttttttttagatgggagtctcgctctgtcgcccagcctggagtgcagtggcacaatctcggctcactgcaagctccgcctcccgggttcatgacattctcctgcctcagccttccgagtagctgggattacaggtgcctgccaccaagcccggctaattttttgtattttaatagagacggggttttaccatgttagtcaggatggtttcaatatcctgacctcatgatctgcccgccttagcctcccaaagtgctgggattacaggcgtgagccaccacgcccagccattacttatttatttatttatttatttaatatgttgagatggagtcttgctctgtcacccaggctggagtacggtggtacgatctcagctcactgcaacctccgcctcccaggttcaagcaattctcctgccttagcctcccaagtagctaggattacaggcacccgccaccacacccggctaatttttgtatttttagtagagatggggtttcaccatgttggccaggctggtctcaaactcctgacctcaagtgatccacttgcctcagcttcccaaagtgctgggattacaggtgtgagtcactatgcctggcctccattactttaaaaaaacgtttggaaagtgttagatgatttctgaggctctaacattgtgacctcagcttggaggaagaatgagccccaagggcacagaatgcagtgatctcatcaacagtcagcaccaggaacatctgctctggccttgtgtttgctgcctcttccccacagccttcccactggggtggtgggttagacagctcccaaccccacaggcagggcctctatgctccaatcctggagaagcatcctgatggctttccaaagagctatgctaaagacaggcccagagactatgacctggggcttccacatcagggatttccaggggtctctgcacagagaaagctttaccatctcttggcttcagtcttttacacctgtctcaaaaaggaagaaaaggccatgcgtggtggctcacacctgtaatctcagcactttgagaggccgaggttggtggatcacttgaggtcacgagttcaagaccagactggccaacatggtgaaaccccatctctactaaaaatacaaaaattagccaggcatgatggcaggtgcctgtaatcccagctactcgggaggctgaagcaggagaatcacttgaacccaggaggcagaggttcagtaagccaagatcatggcattgcactccagcctgggtgacaaagcgagactccttctcaaaaagaaaaaaagaaaaaaaaaaaaaaaggacagaaggtgagaaggtgaaaggagggccagatgttaaagacttttgctaccacagtgccagccggccacctgcatgtcctctgtggtgtcatcacagccagaccctcagcaggctcacttgggagactttcctctgcttcctccacctccaaatcactcaaagtgtgattctctttgggcctaagacacccaagagcctactgcttgctcaggtcaccctttccactgtgcaacagccaggacaggaatttcctaaacgctgacgacttcagctttggccttctcccatttctggtcctcaacagagggaagaacagctggtcacttgtacaaaagccctccaactattagaacaccttggtaaatatcctcttttttctatctaattaatcccaatgcctttatcttttcttcaagggacattctcatctctacctcacgcaacagtcttttaatcatctttatggatttcctctgagccctccacaagtttgaaggaacacggaataaggtcctgaagatctgttttctgttgctgcaaagatgggagggagaaaaaagtctttgttgatgagaaaggggaataatgaagctaaacatgtagaataaactagatttctctagagaaaatggccttggccgttctgtctttgttgaaatgagacgcaagaagcaagaggagatacaccatctgctacttggagaaacgaggaggcctctgttattatcttatgctgatgaacggccacagaagaacatatatttttggcatcattgtattaattaaaagttattcattgaagacaaagctcaaaaggctaaattgggagagacagaggacactggatgacataatcgcaatctttaaagatcccagaaagccaaactcaggctttctgcaggtaagggcatgcactttagcagggacagatgcagtgtcttgaatttcgggcccagacctaaggttccttgaacaggatgacaaagataggcttaaccaccagatgagaagtgacgcagcagggttttcagctgatggaagctctccattttatgtctgcttcttgtgaagaactgcctatccctccctgtggtgggctgccaaatgctgccaaatgccacatttgttccatgtggagactgtgcagtgggtggggcttatggcaatcttcaaatatttaaggatctacccatgtgaaagaggaattagtcttgttctagtgtctaagaagacagaccaggatcaaagttatagggagccacaccttagatcaatgtgtgaaagggctttctaacaatagtcacgaaagctaggatttgtgaggccttgcctaagcccagccctgcgccaggcactgccaaggtgcaagtgatcactccagtctagagaggagaagggggcctggagacggctggtgacttacctggcatcgcccagctcatcagtgggagggcaaggatggggaggcattaattcataggcctgtgtaatttgtatgcctgctgtgctgctgcccgaagtctaaccaagatgtccatttgaaagcaagagggctgctgtgaacagcctgtcactggggacacgcagaaagacccaacagataagatgctgtggaagaaatctgaacacaggtgtagaactgaaccaacttcctggaaggtctctcccaactcagagagtggaggatttgacgcatagctcaagaggaggagttgctgtgttcactctgggcacccttccttccttctcctcaggcgctccagctacgctgacagcacagggtgctagagtggcctcagcctctcctcaaatacagccacatacccatgagtctgcaggcaaacagctcacactgccaagcttccctgctgctcttgcttcactatgggaagctacacccaaaagtgctttgcgatgtgcaggaggcaaccgggacataacctgcccacagttatgatcatcctagggctgacaccaccaattatctctcttcctattccccccacctcctaccccaggaatttatacttgaactgggagcagcttctgttggtgggaacatctgggttgtttccatggcctagccagcactctcagctctgtattctctgccccgagcactctggctgccctccagcttgatggagggtcctggggacacattctgattccagcactttctaagcagacagtggtatttctccacatggaaggttggctgttcagtgtggctctgacccttgggagaccctgcctgctggcttttgactgccaggggaagaaggggtgggaagatgtcggcaatggcggaggcgtgcagccaaccagccaggacggctgtgtctgttcacggctgtccacagtgctgcccagctcctgaatctgctgttgctggaaggacagcctcccactggcaccgagagtcattccttttctatttgatttataagatagcagtgagggctgggaggcttggagttggaacaaaacagagggaaggaaaacgtcatgggaagcaacctatttttgaaagctgtgagctgacgccaggagattaggttctgtttgtcttggctgatgggcttgtttaaaaaaaaaaaaaaatcccaaaccccctctccccccaaaacacgaagtattcctgctgtctgggtctgctctggctgtctggaagcatcttggctttgttcaacacaccccctgctgccaggagcacggctctatccagagcaaatcccccctgtcagcaggaattccgacgctgacacagcacaaagctgcctcaagaggccttctcagtttctggactgacctcagaatcctgtgcatctgggtaacgcctggccgaaccttcctgcaggctaggaatggaggccaatgacaatgcattcaagggaagccaggtcccctggagtgtggcacatattcagctggatctgctgagctgaggcaagcctgggctgatgcaggtgtgtcaggagtgaggtctgggaactagggagaggccactcaggactcctcactggggctgggccaagggtacttttctcagcttcaagagcaggctggtgtagttacatggagacaagttgtttcccggtctatttcctgcaaaaagctgcaagctccagggaccacagctcatgcacctctgtgcccctaggactgtgttttgtgtcaggcctggaacaggtctccacccaccctcacccccataagagccgatggctttggagtaggaagggggcacaataagcagcaacttgggaccaggacagggccttcacaggcggcaagcatgtgccagcagcagggtagaaggtgtagcacttggggaccaagactgacaacggagggccagacacaaatggcagtatcagcagcagcagcaggtgtatcatgagaaactcatgccaggttgctaaatcagtctggctcctgacctgttccctcaagcatcttgcctcccattgaaaagtgtgtggggccttgcagttcacagcatccttcttccaccctccagaaggtcactgcttctaagggcagtaccactgacattttctgcaaatgccagggtcatctgaggctgggtgtggtggagatctgggcactggctctggacctggctgccctgggaaacaggcctgaggtgggggccttgaccctggtttcaggggtagactgcaggccgcccactcctggaccccattctgccatgcccccagatccatgggctgtccagaggcggggaggccagtttgcaatggcaaaccacaatatgcctgggaatcctcagtgttagggaaaagcatgggagcatcacacttcatctcagtctcaggacaccttgggggtgaggtgccactacaagggctcctgtgcacagtcaaggttgaacaggccctcctgcaaaatgtgatgttgagggaccaaaatacagaaatagtacaagctcaactacatttaaaataaacctacaaaaaagtcagaaagaaaatacatcaaagcacctacagtggttatttacagatgcttgggtcaaagaaagttattttcttttctgtgctttctttttctttctgtgagcatgtattctacaactggcattttataatcaggaaaaaaatgttattaaggaaaataaaaaagacagacagtggtactggcctctgcctgtccgtaggcaacgtgaggctgcatgtgtgctcacatggactatcaacaacagggccactggacctgtcccgccttgccgctgtgtccccgggtgggatcctccaacagtgtacggtggaagagctgccaccacaggccaagtgcttctgaaagatgactcacctgcagcaactccagatcagatgaatcctcctgtccagggaccatttctgttaacatctcagacatgacttttgtgtttcctcgaacgacgtccagttcactccgcagcctggcaatctggtgggggccacgaggaaggaaagcaggaaggaaaggtcagtcagcctgcacttgcaatatcagaatcagcttgctcctagtctagtgacaatccttctcactgggagatctgggttgcctttctgagtgcacactgcagaggccaccttctcatctccctctggcctgcctgtcagctctgagagagctgaatgggccctgccaccaacagtctgttgtgcctctctgactgtgacacgaaagcagtaccacgtagtgaagggctccgtgtcaggagtgcaccaagctggctctccgtctcggctctcccaccacgggaacttgagtagaagctgaacctctcagggcttccgttcctgctctttaaaatccaagtgcaggagggcaggagctctgagatcccttcagagctgagatcctattctacaaagctctgagttatagactctgctcctaggagttttacatctaaacactaggatccctctgagaggctgggcagtgtcaatagcacttttctgctgcggcaagaatgagagaacaggggaagacgacaggggagacaccttccccacccagctccctacatggtaacacagccccttgaaaaatacccaagttgcccatcagcgatcccaaagcctggacctgggccaaggcccaaggctcctctccagcaacagagacatcatacactttctccccttgccctcagtcctgtgcctcagatctgccccttcactccctcaaccccctcgaaggatctgcagaaaccacagggaccttccttgcccacagtgaaatatcatagaagaatctgcatagaggtggctactggtcccatcactcagtgacaagagaccaaataacgctggacagaggtcaagaactgcacaggacactggagggagccctggaagactcagcagcaacatccagagccggacctgagcctctctgagccttcgtttcctcacctacagaaaggtggcactaacctcaccaggctgctgtgagtttcccatgcggcgcctggcatgcaggtatgctctctactacacacatacggcccttgttcctgctcaaaggtccagagagaggaactgtaatgtcattcttcctgcactgtgacccagcttaagtgacaacttctctccccagtgaagccttttctgactctccccaccccatcctgaggtagaagcaaccactcccgcctcctcaggttcccactcgctgtgccatcttccactattgcagctgtagcagcctctcctgtgtgggtgggctctctcagcagacctttagcttcttagggcaggaactcagctgggttgagctttataccctcagcacagagacagggacaggagacctcaatcaatggtctaccagggagatggtctgggtcctgagaggctcttgttagcctctggctctgcctggtggatgatccaggggttttcttcaaagtcttggtagagagaagaggtttctggctaggaaggcccaggaaggctatgggcagccacccagtagactctgaagccctgggtcctcttggccaggctgggtgctgacctgcctacctctgcttgcattctgctctccaaggggcaacatgcctcagggctcctgtgctacctatgcccagaccctgcagacccagcatcttctggctactaggagggccttcccaagcacctcccacactttgagtcggtgaaggggctcagtaactgtccaacttcaaacattttctgccttccctcagagcaggaagggcacagttctgcccatagaagcagggccaaaagccagagaccttctttcccacagcacttgggtagccacaatgaggacctcttccatctgcctgtcaagcccacagctgcctggtggggtaacaaatcacttgttctactgatgggagaccggggttaaatgtcctgactgaagcctagagtgagcagcagagctgggggctcacacccaggccctgggggcttcaagttcactcctcctgctctcaccgtactccctgctcagagctagcagggaagtgtgaggaacacgacacaacactgccatccctacacacacattgctatccctacacacacattgcttgacccctctgcttcagtgaggttccacagtcatgacattgtcgcaaatagtaaataaggatttggtaaatataaacattggagagtttttttttcccccaagtctgaccaattctcaaattgtaactaattgaagttctatggattcttctaaagagcactccccaattcatctaaaaaatccagtgtggggttaaaactgcattagtttatcaggaagtaacccgggagggtggggagtgtttgggataaaagcaggcttcttgtgcttcaggagggcctccctgatcaggtcacaggcctctgatggctgactttttttatgggatagatctaagcctctgcatgatagacaagcccgtcacaactcagctgcacgtctatgcttttggcctcacattctgccatggtttcctcccagatctgggccctacatatgcgcctgctctccaatcaagccacctgctgctccgagagagcagcgtctgcatctctgcatttaaatgtcattgctgagcatgcggtctcacctgacaaagcccaactcctgtgtcaggaccctctgcatgtcaggtccccggtgcctcccaggcaccactcaaccctgggctcacaactctgagcccttggttctgctccccaccacagcctgaccacaatccatcatgacttcctcagcatctctctcccctggggattgagcccttccatctctgtgtccctaacacccagcacaatacctggcttgggaggcctttgtaagtgtctcccagaaagatgaaaaaggatagtcagctggcttgcctatggccccgaagtatgcaagtacctgttctgaattggctgtgatggggccagtcacactcagagctggggcctgcggtgcggagtagggagcaggaggcggcgaggaataggaaccagcacttgtcctctgctgtgattgggacctgggcatggtcgcagctggatccacttcagggacactctggcatggcaacaacaaagtcctctgtttacctgggctgcctgcatagctggacctggtacctaccccaccccatgcagcacttccccaaggctgcccacgaaaggctcaaggccctgctccactgctgcccgggtgaggttcacagaaccccactgagcccaggctctccatctgggaagtggggctgccaatggctcctccctctacttacctctcaaggaatgtgtggcagaccaatgaaagcaactccaaaaggcagcaccgagagtgctctgtgagccctctggtcatggttcctattattaagaccacctcgggatccaagtggagggagggcggttattaagttttgctaatcacagatctttacttggtaccataagaattacttttttggtctttacaagtagactaatataaatagtaattatgcaatttaccaaatgttttttgtaattataggaacaacaacactgctctctgtcattattagaagaatgaaacaggttatgttgatttcacaaagcatagcgcgtggtctggagggatcatgatgaaaacagcctccagaaagggcaatcccctgggccaggtgcggtggcttacgcctgtaatctcagcactttgggaggacgaggcgggtggatcacaaggtcaggagatagagaccatcctggctaacacaatgaaaccctgtctctactaaaaatacaaaaaattagccaggcatggtggcggtcacctgtagtcccagctactcaggaggctgaggcaggagaatggcgtgaacccagaaggcggagcgtgcagtgagccaagattgtgccagtgcactccagcctgggcgacacagcaagactccgactcaaaaaaaagagaaagggcaatccctcatgcttgccctttgggtatctcagatgacctcttgcacattaaaattaagtcgtgttcctacgagagatgtgcacaggtgtgctatccttctcagagatgggcagtgggggcaggcaaggtgaagtgtactgggatgaggtgcctctcccagaccctggtgctttcctggctctcccccaggctaggagtggagttgattcccagccagtagagggactagcttccttgagaaaccatgaggcatgacctacatgcttttaaccctgaagtgccaagctgccccctccacggtgctcaagttactgttggcactgcaaaagctttggtgggatgcccctaaagggaccttcccagggctttgatcccaaggctgatggaatcaaggattgaatccagaatcaattctggattgatgctgaatactcacagctcaaaataaattttagatccatttgacttggtacaattgaaaaaacagaaagctactttttgacccaagagtgacatcaagccctgaggtgctatggtgctctgagggacaacaggattcccacaccagattctaggggcctctgaaaagcaggtgctaatgaccctcacaggatggctccgcccaagtagccatttccatgaaaaccctgaactgatccctttattatattcttccacagacactgctgccacttaatcaccagtcaaccagctgtctcactcctgcatgccccttgttattaaaaaggaatgcccccgagctttaagaaagcatgatgacaagctgaataattcaaaggcagcagcagaagggtggctgcagcagcttggctcacccgttctgcagtaggtctttctagaaagtgccagctggaagcttacccgctgtggtgtgtgtatgggagacagagcgtccaagtctgccatgggaaattcaacccctttcctcttcagctcctcatatatgtgcacaacgccggtgagatcaggactgcttcgaaaggcatcagcccatgcctgggataatagaaggcctgttaggaagcatttctcagagctgccatggtatctgaaaatccaaagtggcccacgtcctctccccgagaccagtgctctcctacttgcacatgcaaattgcactggctaaacctattctgttcctctccttccgcaactgctgccacgacacagctggtgaaaccctggctttcaatggtgctgctgagcgtgaacaaaaacacaaaacttaatttagcatgtatttccttggagaagagacagagaaataacacctatgcacggtggtgcatcctaaaaagcaggaatttccctaatggcaaggaaatcaattgctggggctgttcagctgcagggagtggaagctggagccttgtcagctcagcagggtgcctgccctctgtgcgggagcacctctgccctgaaagcttctactggtggagttgggaaccggcaacaaattgagcagaaaggaaaggagaaattgatgtgtgacatgaagtaaaggctaactacaggtttcctcagatcagagacaactaatgctgagcttgtctagcctagctctgtctagcgctgctgccagtaggtgagatgactgtggttcaagggaagaagagcccattgggagctagacccaggccagactggggagttcacccccaggggtccttttcccagacccaagcttctttcatgatgtccgctgccaaaaatgtcagcacatgtgtgcccaaatcgaaaaatcccaagaaaagcacaatcaccagattcccttcagtgaaaacatatcacagagaggaaagagcaaaaattcaagtagattatcatttctgttgactcatgaaacttaaaaattaaaaaaaaaattctgggctgggtgcggtggctcatgcctgtaatcccagcactttgagaggccgaggcggacggatcacgaggtcaggagatcaagaccatcctggctaacacagtgaaaccccatctctactaaaaatacaaaaaaattagctgggcgtggtggcgggtgcctgtagtcccagctactcaggaggctgaggcaggagaatggtgtgaatccgggaggcagagcttgcagtgagctgagatggcgccactgcactccagcatgggcgacagagcaagactccgtctcaaaaaaaaaaaaaaaaaaaaaaaaattctgttctttggaagtcttggactgtatcaaaaacagaatactcaaaggccttcccagaaatggcccttctcatgctgtcccattcaccatacatacccaaaggaggaggcagagcctcctgtgcccatgactccattgccaagtctgtcattgtcacagaatttaactgtctccctcactccagcaatgtggtacaaccaatcctgaggcagccacagaaactctgtctctaaccaacagacccatttgaagttaaaaggtcagtttccaaaaagcctccttaattatgactgatgcatctcaccaggaacagtactgtcagcccggctttccctgatgcacttatttaatttgcatgctcagggatttaaaactactggatcaggacagcccctcttggccaacactccttctggattctgaggagggccaaagaaagtgcctcacagagcactgtctggaaggcccagctggaggagagtaggttgcccgtagggagtgcctctggccccgcccccaccagctgcgctggctgcctccacctggttcaaaatccagctaagtcctgtgacgccaacctcaaaatgccctagcattttagtttagggtgttgactttagggtctaaaaaccagtttcacagcccactgtcggaggctggggaaaaaacacatggcagttcttcctggcaccacttcatgcctttgtacatggagtaccaacagctccagggattcctttcaattcatctagctctctacccaagccaaatttgagataataggaataaagatgaaagaactatggctcttctctccagttggaggatacttcttcgggtccactttctaaggcactctgcttccatgttcacagagacagactggagtgggagggaaatgcacacccaagttgggccaatcagatgctcctccttccaggaactcagcagcactagaagctgggatgttctcactgggtaggcagaactgtcctctgtaactccagggccatgtgccagcacaggactggaagcagagacagcctatgttctccagaaggagcagctagagtgctcggaggtgcaggcgtacaggagaggatttggaaggccttcctgatattttctgtcccttcccagggcggggtgacctggacttctgggagactctgccctgtcatgacaaactcttctctttgcctaggcaagctggagttggcatctgttatttgcgatcaagtagtcttggctaatctacccgcttcctacctgccacaattccaacccttatctgggacctctgtgcagactggatgagatggctgctaacagagcagatattcatgatggcaatctctattgaataggattctcatgccaacagaggaaaaaatggggtgcaggggcgcctctgaataaatgcagctctgggtgtctctcatctctgggtgtctcccattcatatgtgaaaacgtacagatgggagacatccagagatgccatgtgtccctagcatcttcttgggacatgcctcaataattgggcatgggtcagagctgtcccccaggctggagtacaatggtggtgccatctcagctcactgcaacctctgcctccgggctcaagcaatcctcccactttagcctccagagtagctgggactataagcatgtgccaccatacctggctaatttttgtattttttgtagaaatggggtttcatcatgtggcctaggctggtcttgaactcctggactcaagggattcacccaccttggcttcccaaagtgctgggattacagacatgagccaactgcgcccagcccagacaccttttgaaggcagacaccgagtctctcacccgtgtacagagaaggcagtcagtcaacatttatcaggttaaactgaattcagttctcacagttactaagcatccttattttcctacttcagagaacagaggaaagatggccacttaggctgtcaacagactgaagtgacagtgacaaaggaggggtgctggaaggctgacccagctgagaatactccctagagaagatgtggcaagcctcaggaggtctggccactcttggagtgcttaacctgaagcctgagagcagcactgagggtgggggaggctgccccctcttaaagctgccttttcagaaagcaaagtgatgcagcggtgtgagcacactctgagggcctgtcacaggagctagctggttaatggccaagtggtcagttcactggaagccttcttttcctgcctgtggctacaagattaggggcttggaagacccagaggaaggtctaatgaggagaaaaaaggaaagagatcaattcagatctccttcattcctttggaccgtatacaaaaccccagaataaaaccagaaacaaacataaaccataacctattcatttctgtatccctgaaagttttgacaaagctttgaatcatcaaatttcagaccaataaaccattgctgatttaaactatgggctctgggatgcctttggatagaagggagcttctgtcagctcctgcttatgccccagaccagacttcctattcccagtgacagggtccccagggagctgctgtccacacagaatctggccagagcccagctaccaggctctgacgtcttcaaagaacacacacctccagtttctcctgtccccactcccatccccaccccaatcagttcactttcttcagtggaaagtgcatatggttagactattgctggggcatggggaggggggctggagaggcatgaccacactgaggtgactctgccaggatgactccatttccgctcctgaaaacaatttcaagggaaaggctcagggatggcatagagtgggagcatcctttttgtcttctcaacaaatgggacttaatgtaagcaaacaaaaagggacacaagccaaaacaccagccaaggcatgaggtgaaaacataggggtgaagctgaaagctgccggaagggaagtctttggtgcccctgggggtagaagtgagtgtcagcaagctaccaaccaggctgcaccactctcaatgtgtctttcctcccatcctcccagggagaccggctccatccagaaaggcagatcctgtggtgcgggtaagccgactgagccctcgcacatgttggtaaaaagtaccagaaccacactgctgggtctgtcttttggcgggttgagggggatggggtggctacggatggctggagggcagccagaagacagaaagcccccatacgggaaaggaaggagtacagtggggaaaggaggggtaggcatcagctggattctctttgcagttggccagggtgctactgatggcaaaggtgccactgggtaggctgaccatgcctgcgaatggcactctgaaagggaatcagaaggtgggctgggggcaggcagatatgcacggatgagctctatcacccacttccctataggcacagggggactttggaaaagctagtgtggagcccaacctcccccttcccctcaatctggctgcagctctgcttccaccatcctcagggcaaccaaaggggcagtgggctttggccagcagctggtaatcagagccatgggttctacctctgccaggacccccaaccatgcctcacaggcaggaggtgttagggaggcacgtctgtgtggcccctttaccttgaaagcttttcaagtgctaacacattcgatctacttttccataatggaaaggttaaggctgtaccccactccacccccaagccacaaacagtcaaaagccagtttaagtccttcctggctgggccctcaccctctgtcatctgcaaacctttgcttctccagttaaactgcaggctccctgagggtagggccaggactgaccctgtcccacttctctgaagagcaccaagaagcatcctgataccacgatggtgcagagaagtctgttaccgctctggcaccccacacttagctgaacctcctctcagcctagccgcattgatatgagagctgctaccaactcacaggctggcaaggcagccagtgacctgtcacctccaaccccattcttgtctcatggtgggagcagcactttctctcctgggggaattgtcagagtctctgggggagtcttaagttttctaaagtatattcaacatgcaaataaaagtactttctttctcaaaggggctaaaaaaaggttgacccaatgcaatgctactccatgctctaatgaagaagattgaaaacagggtgtgtgggtgaggatgcgaagcaactaacattcttgggtgctggtggctgagaacacccaagagcccagtggagcccattccccaccacacagcaacctcacaccccggtatgaggtggatacatatgaaattgctaatatttggccatttttgaccaacaaagatggcactttcacatattcaacttaatatattcccattaaaaaggaatatatatatgctcaagaaaagtcaagtgctagatgctcatagcagcatttttcacagtacccccaaactgcaaacaccaagtccccatcaacagtgggaggggtaaataaactgtagtgtgttcacacaacaggacttggcacagcaatggcaacgaaagacctagaatcacaggcaacaatgcgtgtgacacccacaaacacagcagaggcaacagagcactctggatgaagttcaggaacagagaagactcgtctatgctgtgagagctcaggcaagtggtcatccggaaggtgggaggttttgggtgtggtcatattctgtttctagatgcaggggctggttacatgttcagtttgtgaaaatttatcaagttgtatacacttttatgtgtgatttcctgtatatatattataattcaattaaaagtttaaaaaaaagaaagggctagggatcctgtttattccattggttcaccctgttacagaagccaagccacccacagctgaatgctgcctgctgtcctctgctgggcagccgttaccaaaggtaagagctcttcaggaacactgcaaatctggagaggaagaacactctccagctgggttatcaacccccatctaggagtagcacccttatctgaagcccatgcttttcacagctggaccaggaaactgtccagccaggcagaagcttgtgaggcatctcaaggccctgttctgctcaggtccccatggccagcacacactgctactgccagaccagcagggggaggcctcagaacatggtgctggccacttcacaccttgggctgatctcatgggctcaggattgagagcagacaggcaagaaccccaagttccattttacagataaggtggtacatgcccacaataaattagtacacctgtctgaggttagcagcaggactgggtaaaagctaggaggagctggaaagtgtggaggggtgatcctgataggaaagcttggaggtgagggcagggtgtgcggggacaggcatcctcagggtagaggtgtgggccacagccagtgaagaaggctgtgtctgccctcagccatggtccccacacagtcagcagggacagtgcagttcacaccccttgtgataactgtgcttgccatgcggtaggctagccaccctgctgggcccgccaccctgcagacaggcctcggggtcagaaagctctaccacaggacatgctttgtgagaagaagccaccatttgttttcctaacatgaattcctgggggtattgaggtaggggagtgcagccccagaaggaagggctgtggtagagtggggtgtatgaggaaggtaaagtgcatgcacacgtgtgtgtgtgtgtgtgtgtgtgtgtgtgtgtgtgtcagagggagacagagagacagaaggatattgggtgggcagaacagggacgagggacaaccctagggtaaacaggggaaggcctcccagagttcctcagaattaactacattcactcattcattataaagaaatactgaacacccgctctacacattacactgctctagaccctggggacagcatgtccctgggttcttagggaacgaagaatgaggcagacaaaagaaatgttagcaaagccagtcttgaagaccacaaaaaaggatgatgtgagacagagagtgtgtgtgcttaaaaccagctggaggcctccgaggcacctgtgaatgaggaggaggagtcactgctctgaaagctggggaaagacctttcaggcagagggaagtgagcacagggaatggacagaggctcctctccagctgcacacctgacccatctgagagcccggcctgccccggcactccacttcctgcattctccgctgcctctgcctggttgcctccctttgcccttgctggagccccacgcccagccctaggtttgtctctcctcttggctcctgcaggcccttgtcttgcctctgccacagcactaatcacccaggctggatgtgcctgttgacttatgtgccttctgtgtcaccacgtgctctgtctaaaacccaggtctgcacacatcccagctcagagcccttcgatgtcttcccactgcctacaggaccaagcatgcctcctcagcatgcatggccactggcctctgggcatccttctggtcccatctcctgcctgctcccccaccccaagccctgcccccaacattcttcattacacccccttccccacatagtggtctctacaacatgtccacaaattatttgatcctcctttcttcaagagatggagtttatttcccctactcttgaggctaggcctggtgactcccttctaacaaatagaatataacagaaaaaaatggtatgtgacttccaaggctaggtcatcaagacctaatcttgatgtccacatggtgataaactcaggtctcttgccaatagtcatcaaggaactgaggcttcctgccaacagccatgtgggtgcaccatggtggaagtggagcctccagctatagtcgagccttcagacaatgcaacctcaagagagactccaagccagaattgcccagccacctgctcctgaattcctggcccacagaaactaagagataatgaacattttccgtttgaaggtatgttttgaggtaatttgtaacacagtgagtgataacaaatacaacccaaatatgccaactgctctctttgatgcgtctgggcctttgcacatgctattctccctgcctgtgaagtctctcccactgacttttccaccaaactccccatcattcttcagggtccaatggaaatgtcatctcctcagtgaaacatcccttaacaccatccccagccccttaccttgctccgcctgacccagagttggcccctgccctgtgacctcaccaaacccgcacgtagctctaacatggttcttcctactccaagttttctcagaggcctgttgaggccaccctacctgcctttgtgagcagcagagggatggcacccagaaagcttcaggaaggctctgttaactggctggagagccatcaattagaatttcattccagtgggatgagaattttttttgaagtattttgcaccaaatattttaaatgtagaagtctccattttttttttcctccaaatggtgggagagcatgaggactcatcaataagagacttcatcttactctgttccaacaaattgggcaaggggtccaacctacctggatcagagcaagcactttgtcctgtacaatggtgggagggttgttcttgggagatataattttgaccagaacactgtcgatgaaatctcggttggccacaaggatgtggaagcggtggccacagttcttcacacatgtctccagcacctgatgtggggagggaaggaaaagggtcaccccagtgggagctggagaagacactgggaactgaggagcgcagctgagtttccaccatcccctctgtcttgctcctagatcagctttctgacacgtctcctccagagccaaacctgcatggcacacgcattcccacactccattctccagggatgacagcagccccttactgactgaagtctcctgtccctgcacaataatcaggcaattagttggtaattgaggcaccagttttgcatgagaaggatgctagtgttttaatgggatcaaaatgactgagcggtccctgaaaattagcattttaactcctctctctgggcctctgggtataaggcattagccaatcggacatgggctctgtcacaagaggaggctgctatgacagcttgaattgcttagtgagttactggcccttatatgtgagaaagcaaatgcacacacacatcccccactcaaccctgcttctgcaaccaaaattggcaatgacaaaggattttccactcttgacaaatggtttgtggacctcagctgccaggtgactttaatgtccatgttcaattcagaccctgcctgctcctcccttgtctgggaaaacaagtgacacaggctttagctgctcagaaaagcccagcatactggttctggccagacggtcagtgagagcttgaacctcagctccaccactttctccctgaatggcccaggacagatctttctgagcctcagcatcctcatctgtaaagcagagatgatgagctctcccttgcaagattgttggaaagattagcaagaatacgtttaaagcataggccgggcatagtggttcatgcctgtaatcccagcactttgggaggccgaggcaggtggatcacctgaggtcaggaattcaagaccagcctagccaacacggcgaagccctgcgtctactacaaatacaaaaactagccaggcttggtggcacatgcctgtaatcccagctacttgggaggctgaggcaggagaatcgcttgaacctgggaggtggaggttgcaatgagctaagatcgcgccattgcactccagctcaggcaacagaacaaaactctgtctcaaaaacatacatacatacatacatacatacatacatacatacatacatgcatgcatgcatgcataaaataatgcacatagcaaagtatcctgcataggggaggtgcccaataactgatgaccatgattacgtgattactgttcagaaggctgctgtacacacgacgaaggggatggcctcttatcctcccataggacaggtatgtagcctcttggaattcggaggtgccaactgggagtgctctgaacttcccagcactgtgtaaaccaacccataggattacctggcccttcccatgccaacagcccccagtgccacagtctactaactggggaatgcctcctcaaaacgatgtcaccagcaacagggaacatttctgactacctcaattattctcatttgcccaaactaatccaaccactggttaacttctgcagccatcccacagggctaggtccaagcaagtgggctttacctggacaaaacatagccgtaaagaaaggtccataactggaacactgactgaatgcgactatatgccaggcactatgagagatccttccataacatatggagttttatccaattctcacaactaattacttctccttaagtggaccttaatatcccatgttttagagttaagaggtttagaaaggtgaagacattgatctaggtacaaattgtcagtcagtgccagaaggagcacaagagctgtgattagccttctctggagccccagtctcctcgcccaccttgaggccacagggccatccctccctcacagctctcctccaagcagccacatcagctaagagtgcctcagatgacaggcaacatgtgttagatttattgttcccccctttggtccttgaaataaccctgtaagatgggaatcatcccattttagagatgaggaagctgaggatcagaggtaccatgtaacttaacctaggaggccaaagctgggactccccatgccaggcagctccgcagccagccagaatcgttccttgccttgctgctggctgcaccttaggaggccccgggttcctctgggcttgccaaggaagattctggaggttagcaccctcagggcctctgagtgaccacaggttttactaagccaaggaggcattttcctttctgagtctctgcttgtgcctgattctggtaaccgtgaggtaattggcattcactctcttgtagtgatccatgggggcactgaaatgaaccagaggggttctttctgttctcaagggccttacaggcacccttctctctaggattctctaaaaccttcctcccaactcaggcagtggggtgttggggtcaaggcagatggcaagaagtatgctttattttgtgagaagcaggtgggaaaggtgaggctgcaattatgagtggggaagagaattggaaaaacaggcataggtctgaggagtagagcagcctggggctccactccactctcagagcaacagtggcaggaaccactgcccgccattagggaatacatgcttagtttctcctgcacagcagtcctcaaggtcagtgtgtcccagcctggtcttggaagtgccctggacagagatgcatgtgccacagagcagccccaaagcctatctgagcaggagatctaggaggtcctccctgggctggcaagagccgctttaggccaccctgccaaacaggaccctggcagttttgtccctataggttgaaaggcatgaaacatacagtggtaattttccagaatgaagccaaaagccatggagaaagtaaacggggcctctaagcaatcagaagtgatgtttaagtccacaaatgaagacacaagcagagagcccctcagggcttcttactaacttattttgggtaaatattaacaattttggtgggtacagatatgaagtccggagagggccacaggaaacaggaggactgaaagtgactaagagagtaagtgaagccctatcagcagacgtgagaccatgcaaagcgcgctaggatggggcctcagtgtagggacggcagccctgcgcatttcacaggcctcccaaaggcatggctgggtttgtagtgaagacctaacccaaggaaaggtcaaacagtgtccatcatgccctgctagaggaaggcaagtaaacgcagagttcactttagaaagatttccatccaacacgattaccatgaagttgggtgtgtaaatggagatgttttagatagcagtaaaattccctgatatattagagctcattccctcgtgatatgagttattgaaagccactcgttttgggcatcactcctggtttagtgaatgctgtggctcaaattctgagaaaaaataaaataaaagcttcaactccctatttctcaaccagtcttttctcctttattattcaaatcccaattccctggcagaactctcttaataagttttggggtttcgcttgggcaaaaaatccaaacaggttctctgctttaaaaggaaacatggttgttttggataaataacctactatttcaaagccccagagaagttgacctggtgacctgttacagtttctattttaagaactcactgtggcccagattttgccacatctgaaaaactgttagttctcaagacagaaataacacctgaagtcgtctttttaaattctctgacagctttggtaagggcaaaaatctggtctgttccttcctgaaaaaaatcacttggctgactttttcaagagtctttgtagctattttcagtttttaccccatgcaaaagaccactttatgatggcaatccacagctcagtacacctcactagctgtgaaggctgggtaaacctccagacctctctgagcctcagtttcatcatctgtacgggggaggatagtaaaatctcttttggagggtggttgtaaacatattcattaatgtccaaaaagttcagcacagtcccaggcaggggcaggtactcaataggtggaagttaactttttttttttttttttttttgagacgaagtctcactctgttgcccaagctggagtgcagtggtgcgatctcagctcacggcaacctccacctcccgggttcaagcaattctcctgcctcagcctcctgagtagctgggactacaggcacctgccaccatgcctggctaatttttgtatttttagtagagactgggtttcactatgttggccaggctggtcttgaactcctgaccttgagatcctcccgcttcagcctcccaaagtgctgggattacaggtgtgagtcaccgcgcctggccaacatttttacaaagaggaaactgatatctagagaaggagttggtctcagtctcagagcaggctggtgacagaaaagggacccacccaaaacctttagctcctctgctctgggcttctgtacctgacagcactgcacacaccttatcttctgctcgtatacatttaccaaattgaagctcaccactccctgtttcagaggacaggaaaacccaaaggcaataccagaaggctttgctggactccagtggcccaggcaccaagccattcagaggttgtgctaagtgggcagagggaaggccctgtgaggggggcaaggccaggagcaaggagttccccagatgacttctctcctcaaggagaatagcactcactgttaatgccagcatcacctctctgtagttccggttcccgttgagccgcttcttcagggctcgaatggcatcctttggcctggaaaaaagaacagacatataaagatacttacaatcccacttgaggacacgatcctacagatatgtgaactagtatatatgcaagactatttgctggctgcagcatgtttgtaaatgtaaaagactgggaacaaactgaatgtccatcaatacacaacaggttaaattaaatcattgacacaatggaatactatgcagctgcaaaaaagaataaagaaactcatgcaccaatatacaccaaactcaaagacatgtgcataaagttctttgcataacagtgtacaaagcttgctattagttgagttatagaaggaaagcaaacatacatagcacaggtgccagcgtagggaagagactctctagaaagagctataacaacctggtaactgtggctgcccctaaggaagggaaccaaaggcggagggaggtttttcactggactgcctttttgcagacctcttgaattctgtatcacatgcaagtattatttattcaaaaccctaactaacccactggtgtgtgggtacatagaagagagtttttccagagaaaccatatgagagacacagaagagagcgtgccaggtccttgtgagccctggatgcccggctcttcctgaattccatggaactccttttcccagagaaagcttaagtgagtctccttaaaacccaacaagttttgtgtttttaggtgacagatctgaggtggattcccagataaaatcttgcagaattatagacagtactcagttcacaaatgggctctgtccaaaagttggagtggagctgtttggaagttggagtgagttcttccttaattactcttataccttagagtcaggattcccaggcagccctctaagtatacatattacatgtaggtcttgtgtctaacatgtaatttaatttattctaactcaggattcaacaaagctgtgggcctagcagctgcccctggcacaaagcccctgtgctgacctgacccatcaccctatgctctggggagccctcagtccggctgtgggccagcgctttgcaatcacacatgggttccagccttccactaatctatgtgtcaatatactggtctttcccagcttgcacgtttgttaagtcagggatctcctattcctacagttttaaaacatttatactctaccaaatgaaaaggccccttcaaatgtgtatgaggaagttgaggaggggaaagggttgatgctctgctaatcagcttaatttaagagaaactgggccgggcatggtggctcacagtctgtaatcccagcactttgggagaccaaggcaggtggataacctgaggacaggagtttgagaccagcctggccaacatggtgaaaccccgtctttactgaaatatacaaaaattagctgggtgtggtggcagctgcctgtaatcctagctgctcgggaggctgaggcaggagaatcgcttgaacctgggagacggaggttgcagtgagctgagatcacgccattgtactccagcctgggcgacaagagtgaaacttcatctccataaaaataaaaaagagaaagtgtgtccagcattatggctcattcctgtaatcccaggactttgggaggccgagatgggtggatcacttgaggtcaggagttcaagaccagcctggccaacatggtgaaaccctgtctctactaaaaatacaaaaaaattagctgggcatggtgatgtgtgcctgtagtcccaggtactctggaggctgaggcaagagaattgcttgaacctgagatgtgaaggttgcagtgagctgagattatgccactgcactccagcctgggtgacagagtaagactccatctcaaaaaaaaaaaaaaaaaagagagaaagaaagaaaaaaagtttaaggagcaaggctactagaagaaaattttaaaacaccctgaatcacctgtttcccattcccagcttgacatatggctgccctgtaggaattcttggcccctgggtcaaagggctgatgagacagacacaaggctccatggggactgggcccaaggccaagtatgtctgcagtacggctgccatttccaaaaggggatgctgatttctgcaaatatgggacttaaccggctctctgctttgaaggctgtttgtggcatgagagctgatgaaattcagtggctactggccaacagcatggactgatttcctctctccaaggctctgccaaaccactgctgtccctgacccacagctgccacacccctcagtcctctcttctgtcctcttgaacttccatggaacaggaaaataggaagagcgcctgagggctgcaatcatttctggctggcagaggaccagcacactcagggctctcctggtgtgggggccacggggtgggaaatcagacagtcagcagcttcctggatgaggtttaaaatgaaaattcatccataggctctgggaagtactggccgagagtgatgggtgagcacaaaagcaagtatttatctctctccccgggggaaaagcttcagagaggaggatcaaagtcatgtcaaaggaaacacaaagtttcaagaagctgcagcagattagatagtgtggagttggaaaccaggagaagagacagaagcatgtgtcaagagccaagatggagcagaaagaaaggatcaggaagaatcagtggcctgtgttgagatggcatcaagccctagcagctttcaggggaaaggtcaggctcctcaggcagtgctcacagcctcgtgatttggcctctgggccatgatcaggctcctcaaagtctccctggaccctagacttataagaactcttccctgatccccaaacaagcctcctgtcatccctccagccacagcctttgtatctttgtccttcagcttcaggactactctctggaaaagctttctcctcatcacccccaaggaggacatggctgcccctcttctgtcaccctgaacatgccctccccattattatcttgctctattgcatgtcttcagttcctcctctgtgccctctccagcttagaagatagaacacaaagattctatgagctgaggagggtccagagatggccatgtaaatgacccaggtcaggggttcctcatgagagctgcacatcagagtcacctgtagtgccattcccaaatccacaagctgtgccttgattgtgtaggtctgaggtgaggcctggaaaacagagtctaaaacagtcccagctgggtgctctggctcacgcctgtaatcccagcactttagaagcccaaggcaggtgggaggtcaggagttcaagaccagcctggccaacatggtgaaaccctgtctctactaaaaatacaaaattagccgggcgtggtggtacacacctataatcccagctactcaggaggctgaggcaggagaattgcttgagcctgggaggcggtggttgtggtgagctgagatcacaccattgcactccagcctgggcgacaagagcaaaactccacctcaaaaataaataaataaataaaaacagtcccaggtaggttattcagtcagccactcctggttaatgcctgaaggactgtcatcaaggccttaggcatcagcattcctcaggctgatggtgacctcagctctggacattagggaaagcccaaggagaggcctttcgggcagtttaccaatctgcacccaccaggaccacagcctcccattggtaaagtattgcacaaatacaagaagtgcaggcagcacttcagtggctgcggccaggtgagcctgtgcttgcatcctgcatgtgcccttccaagctgtgctgcaaggcctttggcaagtgaccaaactactcagcctcagtttccttaacactgaaacaggctgtcactaccatatagaactgttgggggtagggggcgctgcttgtgatgatgcactgcagggctggacacagggcctgcagggcgtggcacatgccaagtgctcacagacagcagacagggtaagggcagtgaatccaccaagatagtcaccaagactgggcagataactgacacccaaatgaaagtgatgacaaaagtcatgggcaatggaaatctttaaagtgaaatagtacatccacatagatatagtatggatatgaagatacagttatgtagccagatacatcatatatatttactcctttaatccttgtaacaaccctatgagataggtattattggcaaccccattttataagtgaggaaatgggacacagacacagggagatgaagtaactcacacaggctcgcacaataagcgagtggtgacctagaattgctccagcctgtggtgtccaccttcctccccttcatccacctgcctcatctggctgataccctggcactctgtaagactccagtctggtgtcacttcctccaagaaggctttgctgccaaaagtcccaaggctgaccactgccactgcactagtctccgtagctatatatagcttctctctctctccctgccccccacccagcactcgttatgcatatgtttatatgcctgcattcctcatcagactgtgagtaccttagagacttcattcatttattcacttatttaacaaatatttattaacagctaatcaaatgcattgtgctaggtgctagggacaaaatgttgagtaattggctgggcgcggtggctcacgcctgtaatcccagcactttgggaggctgaggcgggcggatcacgaggtaaggggatcgagaccatggtgaaactccgtctctactaaaaatacaaaaaaaattagctgggcgtggtggcgggcgcctgtagtcccagctactcaggaggctgaggcaggagaatggcatgaacccgggaggcggagcttgcagtgagccgagatcgcgccactgcactccagcctgggcgacagagcgagactccatctcaaaaaaaaaaaaaaaaaatgttgggtaaaacagatggaaatcctgtcctcatggagatcacagccttgcgggggttgcagggcaagacagacactaacaaccgtcccacagatctgtaagtttaaactgtgatgagcatcagtacaacacgggttatgaaatcatataacagaggacttgtccaaatcaggaggggaaggggttagggaaatgagattcaaactgagagatccagtgaatgacgggatctacttagtgaaagaggtgacgagaacagaagggacagcaggtcagaggccttcagggagggcacaaaggggtgggtggggtgccctactgtcagtccaacttgtgggagtttctttcactcaggaagagattattattattattattatttttaagatatggggtctcactacatttcctaggctggtctcaaacacctaggctcaagcaatcctcctgcctcagccttctgaataggtgggactacaggcatgagccactgcaccttgctaggaagagattttgagacacctcacagcagaggcaacaagaaaacattctcaggaatcactgaggtgctctcactcaaaaaggtagcaacaggagctttagccacttgaagagaaagatgtgtgtgaccagccttctgggaattgaggatttgaaaaagaaggcattggccccttcagaataaggaagctcctggggttcctgggcttcctgccctcaagccatagagatatttgagcaattcactggaaaataagagttgccaacatatttgtatattgctcaaatctgtagagaatttcaagctgggcccaggaatatggaaaattcaaggagctgaaagatcagcagggttgaagagctcaaagtggagctgccgaggggtctggggctcctcatgaggggcctggttggggtttttaacctaagtgcctgcgaaacccctgaaggcttgttagcaagggagcaacttggtcgttgtgcagcaggaaggggtaggagggaaggggtcgaagcagaggtccacctctagggtaaagtgcagacaccagagaatgcagcacctgaccttgactacctttccagccggattccagaccctcccgctcccccaatgtcaccctgtctatcctagacagcttgtatcccttgacacactggcccttttgatgccacccttggctacgggacacatttctcctgccatcctggaagacagcccctccaggaagcattgatacccacctttccctctgggaccatggcatcagggacaggccttggccacagcccttgccagtcctgccaggtgagcgttcaagggcaggctggaacattcaccttggcatcccgtagctgctatacctccacccctgggggtcagtaaacatggccagatgactggacaaacaagtgaatgagtggcatgttaggaggacgtgaggaaggtagccactcggagcccagtgacgatgggattagagatgtgtagtccctaacaactatttgtgagtcacgtctgtgtaccaggcaccaagctgatcacctatatttagctggtgaaaatatgccacctttcaccaaagactcccacgttttcatccagtgcaggccactgcccccaactcaagttccctgtgcagttccctgtcacatcttccaggagcctggctggcagcaaagatctactgctgatctctgctccccagcctgctccacctcaggaaacagcagctccatcccatggttgttcaggccccaaaccttgcaatttcccttaactcttcattcctgtcttatgtcagccaattccattggctctaccatctaacacattcagaatcccatcacttctaatcatcatctcacaccagtattactgtgataacctcctcactgggttttctttcttcttttttctttttagagacagggtcttactctgtcgcccaggctagaatgcagtgacaccgtcctggttcatcacagcctcgaactcctaggcgtaagcaatcttcctgcctcagcctcgtacagtgctgggattgcaggtgcacgccactatgccaggccatcgctgggttttctgcattgtccttggcctgcccccagtcaggccactctgaacacagtagactgagtgatctctttccaataagagtgggaccacaccactcctctgcttgaatctccaaaaaggttgaagccagagttgctctggttctacatggccctgtgttatctgggtccccagtatgtcggtaacttcctctccaggtactctcttctttgaccactctgctccgggcccattagccaccttgctattcctcaaacacatcagacaccctctgtcccaggacttctgggtttgctgttccatgagccttgacagttcttcccttgtataatcctcaccccctactccctcatctccttcaagtctttgttcaatgtcaccttctaaatgagacttttctgttgttttgtcttctcttttcattttttttttttttgagacagggtttttctctgtcaccaaaactggagtacagtggcatgctcatggctcactgcagcctcgacctcctgggctcaagtgatcctcccacctcagcctcccaagtagttgggactacaggtgtgcaccaccacgcctggctaacttttgtattttttgtaaagacaagattcaaccgtgttgcccaggctggtctcgaattcctgggctcaagcaactggcccaccttggcctcccaaggtgctaggattacagatgtgacccaccgagcccagccaagacttttcttgatcactctatttaacattgctaattcccagcctcctctctccccatctcccttccacagtcttgtcctcatctgaccaggttatatgtttaattatcttgtttatggcctgcctccctactactctagactggccgctccccaaggggaaggaatctatcttgttcactgctgtgtcctcagtatttacaatagggcctggcacaaggtagtcattcgagaaatatttgttgcatgaaagcaggaccaagcttgagaggctggtccccagttcacacatggcaaggctagagtgacagtgctgagatgccagcccagggatgcctgagtcccagctgctctccttgccactcctgaaaatggtttaagagggcatggctacagtaaagtaagtgttagtggtatggacagagggctaaatacagaccagtttggaagaagtacaaatagagtgcagctgtaaaacaaaagaggattcaggaaataacaacaggaacggatccagcagtgcaggaatgcaggaggggcaacgtgttctaagtccactcatgccgctttcccactcccggccgtgtctgccccatgccctggacctccctccatggacacggtggtgctctctgactcctggcaaaccagggcagagacaggctgtgaaggagaggcagaggccagggaggaggggagggacgaggtgacacttgggctgcagagactaatggccactgggaaccaagtaatcaagcagcttcatttccacttgtgattaaaagcaggtgattaaaggaggtcatccctgttctacctccaagcactgccattgggcaagtgggggagggatgaagacaaaaaggacagataattcagagtgtcagcttattcgatgccaaaccaaacatactaggaacaaaacaaaaaataaaacctgccacccttaggccctgacaagctttgagtggcccctaaaagctcagagaggcttcccaggagaggggggcacacgtacccttcctccgtctcattgatgatgtcacagatctccatattcaacgtccaatcctcactttgcagggagccatctgttgccttttctgtgaaatcagagagaaaatgggtttacatttctcctggaataagtgggccttggcaggaaatgggaagagaccagaaccaccacattcttctcccaagcagatgggctgagccaacagagccattctaggagtgctattatcacaagagaacacccgggaaaggtcctggcctgagggctgatgttataacgaggttcttcattcaccaaactctagactgaaaagcttatgacaggcctaagccatcaaaaatcaccccaaacatgaggatattaggtttatgaacccgtagagtctggagccaaactacctaggttcaaatacaggctccactacttactagttgtgtggtcttgggtaaattacttaacttctaggtgccaaagctagtgaaaacaacagcacttacctgatatatttgttatgaaaattaaatgggttgatatacatgaaacacttagaacagagcctagcacacagtcagtactatacaggtatttgctattgggattattaaaaatcaattgcagtagttaaaaactacatttcagataagggggagaaagaaaggaccattggttatcaagccactgtaggtgtggtgttgggtgtttcacgtacattattttatctcatccacaaaatgactttctgaccactcaatgaggaaaggacagtattttcaacaaatggtgctgtgaaaattggattgccacatgcaaaagaatgaacttggaccctttatcttacaccatatacaaaaatttactccaaatggatcaaagacataaatgtaagagctcaaactaaaaaactcttagaagaaaacatagtgaaaaaacttcatgacactagatttggcaatcatctcatggatatgacaccaaaagcacaggcaacaaaagaaaaattttgaactacatcaaaataaaaacttccaggcatcaaaggacacaacacagtgaacctgcagaggaagaaaatatttgcaaaattatatatatgataaggggttaatatccagactacgtaaagaactcctatagcttaataacaaaaaaacccaaactatccaattaaaaaatgggaaaggacttcaatagacatttctccaaagaagatatataaatgactaacaagtatgtgaaaagaggttcaacatcactaagcattagggaagtgcaagtcaaaaacacaatgaaatatcacctcacacccattaggatggctactatcaaaaaaatagaaaataacaagtgttggcaaggatatagacaaattggaacccctttacacttttgatggaaatgtaaaatgatatagctgctatggaaaacaggacggtagttaaaacacagaattacccagccaggcgcggtggctcacgtctgtaatcccagcactttgggaggccaaggaggatggatcaccaggtcaggagatcgagaccatctggctaacatggtgaaaccccgtctctactaaaaatacaaaaaattagccaggtgtggtggtgggcacctgtcgttccagctactcaggaggctgaggcaggagaatggcgtaaacccaggaggcggagcttgcagtgagccaagttcatgtcactgcattccaacccgggcgacagagccagactccgtctcaaaaacaaaaacaaacaaacaaacaaaaaacatagcattaccctatgatctagcaattttacttctgagtatatacccaaaagaactgaaagcagggccttgaggagatatttgcagagtcatgttcatagcagcaatagtcacaagagccaaaaggtgtaaacagcctgtgtccatcaattaaagaatggataagccaaatggatatacatataatggattattattcagccttaaaaaggaaggaaatcctattgcatgcacaatatggctgaaccttgagggccttgtgctaagtgaaataagcctttcaccaagacaaatactagatgattctacttacaatcaggtacctagaatagtcaaatttaaagacagaaagtagaatggtggttgccagaggctgctggggggtgtgggggtgggggaatggggagttattgtttaatgaacacagaatttcagtttggggaaaatgaaagagttctggagatggttgttgatggttgcacacaatgtgaacatacttaatgccactgaactgtatactttaaaatggttaaaatgggccaggcaaaatggctcacacctgtaatctcagaactttgggaggctgaggcaggagggttacttgaatccaggatttgacaacagcttgggcaacatagcaagacattgtttctacaaaaaatttaaaaattagctgggcatagtggcttgtgcctgtggtcctaactactaatgaggctgaggcaggaagattgcttaagtccaggagtttgaggctgcagtgagatatgattgagccactgcattccagcctaggcaacagagtaagaccctgtctcttaaaaaactttttgttgaatggttaaaatgataaatttaatgttatgtgtattttaaaaaccaccaccaaaaaagacagaaaaattatacataggtcaatggactgctgggtcagggagtagcagggtggggatcagagatcatttgggtctgtagcctcctttgacgggaaacccggggcccgcagaagaaaagggaaaggtccaggagctcaggatcgtcagtggcagagccaggactacagccagggtcacttgactcccttccccctctgggatgtgagctctgtgagggcagggactaggtctgtcttgccttccactgggtccccagtgcccagcacttggcagtagtgcaatgcatttacatcagatgaatgactgcattagcaacccttcctctaagttatggatctcagccctggctgtacacgagaaccacctggggagcttctagagagcaccaatacctgagcctcatgccccagaggttctactttgaatggtatggggtgggattcagtgattattactattattattattattatttttatgtgagacagagtctcactccattgtgcaggctggagcgcaatggtgtgatctcggctcactgcaacctttacctcctgggttcaagcaattctcctgtctcagcctcccgagtagctgggattacaggcacgtgccaccatgcctggctaatttttgtatttgtagtagagatgggtttcggcacgttggccagactggtctcgaactcctgacctcaggtgctccacccacctcagcctcccaaagtgctgggattacaggcgtgagccactgtgcccagccccaacactcttgatggttggggaggtagatcatttggctgttttcttctccattctcaccaaaaggatgttgctgaatgcaaaatgctaaaaccagtcctcttttgccttctggtgttggctgcttctgaagtcactatatttaacatcaaagtgtagaaagcggcagccaaaaagccaagccgctggattgcgaggctcctccaaacagggctgccttaggtttcagagaacataggagggtgggtgggcagaaaaaccatgctcagagccagcactatcactgctgtcagcgtcaaggcttcagggcatcctggcctgggtcctaccccaggcgagagaaaatgccatggcaacggcatcaggatgctatgctgctcttgcactgaagatttaatgggagccgtatctgattacccgagctcaggcctgccctgccctgtccagtccagcccagcctggcctaccctacccagcctcttccccagcccagtccttggccattagcatatcaccagagaggtcagcactttacaattatccgtccagagggctggctggtgggaaggacttgccccactgttccctagaacacttgtgtttctgctgttgcaccaggttttattttaggttttgacgatttaggtgacaaaataaatgagactgaactttgctttcctctggcctggggacaggactgagtgagggagcccacattgagtggccttagttccagaggcaatcagatccaactttgctcttgattagctggaaattcttttttttttttaatttttttattttttattgatcattcttgggtgtttctcacagagggggatttggcagggtcataggacaatagtggagggaaggtcagcagataaacaagtgaacaaaggtctctggttttcctaggcagaggaccctgcggccttccgcagtgtttgtgtccctgggtacttgagattagggagtggtgacgactcttaacgagcatgctgccttcaagcatctgtttaacaaagcacatcttgcaccgcccttaatccatttaaccctgagtggacacagcacatgtttcagagagcacagggttgggggtaaggtcacagatcaacaggatcccaaggcagaagaatttttcttagtacagaacaaaatgaaaagtctcccatgtctacttctttctacacagacacggcaaccatccgatttctcaatcttttccccacctttcccgcctttctattccacaaaaccgccactgtcatcatggccggttctcaatgagccgctgggcacacctcccagacggggtggtggccgggcagaggggctcctcacttcccagtaggggcggctgggcagaggcgcccctcacctcccggacggggcggctggccgggcggggggctgacccccccacctccctcccggacggggtggctgccgggcggagacgctcctcacttcccagacggggtggctgccgggcggagaggctcctcacttctcagacggggcggctgctgggcagaggggctcctcacttctcagacggggcggttgccaggcagagggtctcctcacttctcagacggggtggccgggcagagacactcctcacctcccagacggggtcacggcctggcagaggcgctcctcacatcccagacggggcggcggggcagaggcgctccccacatctcagacgatgggcggccgggcagagacgctcttcacttcctagatgggatggcggccgggaagaggcgctcctcacttcctaggtgggatggcggccggacggagacgctcctcacttcccagactgggcagccaggcagaggggctcctcacatcccagacgatgggcggccaggcagagacgctcctcacttcccagacggggtggcggccgggcagaggctgcaatctcggcactttgggaggccaaggcaggcggctgggagttggaggttgtagcgagccgagatcatgccactgcactccagccggggcaccactgagcactgagtgaacgagactccgtctgcaatcccggcacctcgggaggccgaggctggcggatcgctcgcggttaggagctggagaccggccaggccaacacagcgaaaccccgtctccaccaaaaaaaatacgaaaaccagtcaggcgtggcagcgggtgcctgcaatcgcaggcactcggcaggctgaggcaggagaatcaggcagggaggttgcagtgagccgagatggcagcagtacagtccagcttcggctcggcatgagagggagaccgtggaaacagagggagagggagaccgtggggagacgggagagggagagggagaccgtggggagacgggggagaccgtggggagacgggagagggagagggagagggagagctggatttcaaagcttcatccatgctgagctgcaaggggaatggacagaactggaaactggggcagactggagttgccagcctaggctgggctgtgagctccatggagcagatgccgggccatcctgccccggctctaagcccagccccaggccagggccggcacctggtaggctcttcatgagtgcttcctgaatgaatgctgcagaatggaaattcttttatgaagagaaaaatcagaactgatttgagctcctctgtcagccttacttccctcatctgtttcagtagagctaaatacccatggttgtgtttgtgtggcattttctgcaaaatgaaaagaaagaagcattctttttgggttggttctttataatcaaaatgggtatatatcttttagcttgaaaactcaaatcccagtaattgaatagaatgcactgaccctgaggataagttatcatgcctttgaacccttccccagtatcataagaggaaaggaaagggtgaatataaggttaatggattctgctgctaaaccgaacttggaaacgaggtttcattgatttaatatttcctctattaagcctcccaagactgtatcccttgtagccctaccaaagtgcaatctctgtactttcttctccatgagagtctgtgccacagcttgagttctgtgaaggggagagactactaccccctagccagctggcctctccccttcctggctcaaaagagtagcaagtccaggcccgcaggcaaagctgcttccatcaggataagtctcctcttgaggaggctgctggatttatggctgcagacatgcccctgctgtgtgtgacccaggtggtgagtcattccctctgggcgtggacagaggaggggtgttcagagacagctgcaggaagagcaggggcaggaggcaggcaccatttcactgctgcaggctcccagcacacctggggctcattctgtgtctggataagccatagggtgacagggcacactgctgtctcagtggctacattgtgtcctcccccttaaccttcctggaacctctgccctcagtcttttcttctctaaacagatgtgcctaccaccacccccattcttcctaggcctgcctgccctcccttggggggctctgatttccctgttaggcccaggtctgctccttgctggctttatgacttttactctctttcccacatgcatgaaaagggcagagagggggtatggcatctctggggcctatctggctcttaaccattgctgacatgcattctcatcccttcctctcctcctccactttccccatcttgtagacaagtatcaaatactgcttctgtaactgccagcctggtgccatctgaggactgactttggttaagattgctccaaatctcaagagcctcctagcccctgcccagtcctctggctgtgtattgcattcatgtgaagtcagattcttactatttgggggtggggttgctttctcagagcaggggcttggaggcacctgggtggtcaagtctttgagtctttgagtgccaagtgtgatgaataaagagaaaaggttagggatatatcttttttaggtaaaaaaaaatttaaaaagagcagtaaataaaacaatgaggctttttaatgcagacagaagactgttgcacaaatgttttgagcaacagctatatttttggagtgtgctgtcactgcttgtaaagtatagcttttgtttggatgtgtgagttctatctagtttgttacgtaaaaaacaagtgtcacttcaccatagctgcatccagtaaaacaaggatacttccagcctgtacagaggtcttctatgttattatctgagtatcggcgaagtgtggattgtattaaacttttattaaaatagtggtgatggtatcctttcatgaattgagagttaggatggggtagtttcagaattcctccaagatattaacttcagatccaaactcaggctttgctagcaggtgagactatatcatgcaaacatccaggctttagagacagaactaggatcaaatattggtaccaccaattcaatgatgggatcctggcttaccaggtgtgaagtggtatcccagtgtggttttgttttgtatttctctaatgactactgatgttgagcattttttcatgtgctttttggccatttgtatatcttctttggagacatatctattcaatttttttggcccctcaccccttttttttaagagacaggatctcactttgtcacctagaatggagtgcagtggcccaatcatagcagcatagctcattgcaaccttgaaatcctggtctcaagcaatcctcccacctcagcctcccaagtagctgggacttcagggatgcaccaccacaactagataattttctttaaaaaaatttatgtagagatggggtcttgctatgttacccaggctgatcttgaacgcctggcctcaagtgatcctcttgccttggccccccaaagtactaggatcacaggcatgagccacaatgcttggctccatttttaaactgagtaggtttttttttttttttttggttgttaagctgtaagagttctttatatattctgaatattaatcccgcctattttatggttgtcttttcactctcttgattgtatcttttaatgcacaaaagttttaaattttgattgtcccatttatctattttttcttttgttgcctgtggttttggtaccatatctcagaaatctttgctaaatccaatgtcatgatttcccctttttaagatttttttttttttttttgagatggagtcttgcgctgtcacccaggctggagtgcagtggcgcgatctcagctcactgcaagctctacctcctgggttcacgcccttctcctgcctcagcctcctgagtagctgagactacaggcgcccaccactatgccaggctaattttttgtatttttagtagagacggggtttcactgtgttagccaggatggtctcgatctcctgacctcgtgatctgcctgccttggcctcccaaagtgctgggattacaggcatgaatcaccgcgcccggcctattttaagatttttatagttttcccttcgctcttatgtttaggtctttggtctgtttggggttcatttttgcatatggtataagataatggtccgacttcactcttttgcatgtggatattcagttttcccagcaccatttgttgaaaagactgtcctttcccctctaaatacttttggcacccttgctgaaaatcaattgaccatatacgggagagtttatttctgagttctctactttattccattggtccatgtgtctttccttattccaataccatgatgttgtgattattatagttttgaagtaagttttgaaatcaggaagtgtgagtcctccaactttgttctttttaaaggttgtttagggccaggcgcagtggctcacgcctgtaatcccgatactttgggaggccgaggtgagtggatctcatgaggttaggagtttgacaccagtctggtcaacacagtgaaaccctgtctctactaaaaatacaaaaattagccaggcacagtggctcacacctgtaatcccagcattttgggaggccgaggcaggtggatcacgaggtcaagagattgagaccatcctggccaaccaacatggtgaaaccccatctctactaaaaatacataaattagctgggcgcaggggcacacacctatagtcccagctactccggaggctgaggcaggagagtcacttgaactcagcaggcagaggttgcaatgagccgagatcacgccactgcactccagcctgggagacagagtgaaactccatctaaaaaaattaaaaaatttaaaaaattagctgggcgtggtggcgcacacctgttgtcccaggtgcttgggaggctgagccaggagaatcactcgaacctgggaggcagaggttgcaaaatgagccaaaatcacatcactgcactccagcctgggcgacagagcaagaccccatctcaaaaaaataaataaaaataaataaaaattaaaggttgtttggctatttggggtcccttgagatttcatgtgaattttaggatggatttttctatttctgaaaaaaataccattggtcttttttttttttttttttttttttttttttcagagacagggtcttgctatgttgcccagtctggactcaaactcctgggctcaagcaatcctcccatcttagccttccaagtagctgggaatacatgtgcatgccaccatgcctggcttcattgcaattttaactgggatttcattacatctgtagatcactttgggtagtgttgtcatcttaaaaatattagcttcccaggccagctcatgcctgtaaatcccatcactttgggaggccaaggtgggaagactgcttgagctcaggagtttaagaacagcctgggcaacataaggagaccccatccctacaaaaaatttaaaaattagccaggagtggtggcttacacctgtcatttcatctactcaggaggctaaggtgggaggatgacttgagcccgggaggtcaaggctgcactgagccgtaattgagccactgcactccaacctgggcaacacaatgaggctgccttaaaaaaaaactgtcttcccatctatgaacacaggatgtttttccatatatttatgtcttctttcttctttaatttctttcagcaacgttttatagttttcggtgcacaattttttgctgccttggttaattcctaggtattttatttttttagaggctagtgtaaatggaattgttttcttttcttttcagattgttcattgttaatgtatattaacagaaacacaactgatttttgaatgttgattttgtatcctgcagctttggtaaatttatgttattcgctctagcagtttttctttttttttttgttttgtggtatcttcaaggttttctacatgtaaagtcatgtcatcagggaacagagataattttactccttcctttcccattgagatgccttttatttctttttcttccctaactgctctggctacaatttccaataccatgttgaatagaagtggtgaaaggcagcatcgttgcgcctatatatatttttacaaaacacagtcatacaccatgagagcaaacaaagctgaagagaagacccatttgagtccttattccataaaaaattgcaagagggtgaaaacaggaaccataacaggatctgcaggtctttgcaagccctgagaaagtcacctcagacttctgtctggaaagccttctctccagcctatctgcccatatctagctcccatccaacgtcctctccagaaccttctttgctgccgcccacaagagaggccctctgatgggctccagcacctgatagtacagttcacacaaggactgagccttcaagaccattctaatgttctgagaactttttcaaatcttaccggcttaatgagccgttaagtatcttcttggcccccaaccccaacctaaactggaagctgcttggaggcaggacatcttcatgtcaagaaggcctggctttatgctgatgagggccctttataagtaaaatgatgattataaacccttctgaggcccccaggtgacaggcactgggcagtctggtgagatgagagctcggttcccagctgtccccggttctcccttcagacttagaagcaggagaaatgtgcattataatggagtctagaacagggagtgtgaactcagattttggtgagttctagttctgccaattactgtgtgactacaggcaataacttgacctctccaagccttttggactgctgcaaaatgctgcaataacagcactctctcacacagtggctgttagaggagactaaataatacagaaaacacctgacagagcctctaatacagaggacctttccttgctgttacttctaactttattacagctcttctgaaaggagctctgccagtgccctccccttgcacccccctcctctcccattcccgtgtcaccactgccacctacaggtaaacagccatccacaagctacacccatcagattcaaaaccctgggagctctagctttctggatttctgggttactgagccaggaagacctccatgcttccagaaggaagcccccaaacttggcttgccccacctgtagggtaaaggagcaggcacaccacaatttccttaagaatccaagcattaaaactccaagaggtcttagagaccatctagtaaaaagattccccataagtccacatttcctggaccccaggaagtggggcatgggggaggaggggccacggtgttgttgcaagttccctatgggcagtttcttgcccttaaagctaccattgaaccactggtctcaagtcttcaaggaaatggctctcattcttttcaccaaaaaaatggagaaacagaagagagaatgaaaacctgtttatttggtttgagccaggttcttgacagacattacctcatttaaccctaccatcccacgccccagccgccaggaaggttctctctctctaataggaagaaaatgaagcctggtggggtgactagccccacagtgtgcagagaggaggtagcaatactgccaaccacatgacccaggtcttcctggtaagcctggccttggaccctgatccatcctcaggtagagggtcacagaggcaaagaagaccctggcctccacaatagacggtccagagtattggatgcagcccaccctcctgatttttaggtgaagtctaaagaccctcctgatttttaggtgaagtcttaagtgtaaaagagagtgctggtgaaagtgtcaagttaaattagatgctgggtcactttattctctcgttctttttttttttaattaatacatcttttattttggaataattttatatttactgaaaagttgcaaagatagaacagagttctcatttgctcttctcaccgtttccgctaatgttcaatatttttttttttttttttttttttgagatggagtctcgctctgttgcccaggctggagtgcagtggtacaatctcagctcaccacaaccgccggctcccgggttcaagcaattctccagcctcagtctcccaagcagctgggactacatgtgtctgtcaccacaccagctaatttgtgtatttttagtagagacggggtttcacaatgttggccaggctggtctcgaactcctgacctcgtgatccacccgccttggcctcccaaagttctgggattacaggagtgagccactgcgcccggctttttttctttttcttgagacggagtatcaccctgttgcccaggctggagtgcagtggtgcgatctcggctcactgaaacctctgcctcctgagttcaagcaattctcctgcctcagtctcctgagtagctgggattacaggcgcccgccaccatgcccagctaatttttgtatttttagtagagacgggggtttcaccatgttggccaggctggtctcaaactcctgacctcaggtgatccacccgcctcagccttcaaagtgctgggattacaggtgtgagccaccgttgcaggcagttcacatcttacataaccactgcacacaggccaaaactaaaaagttaacattggtatagtactattaactgaactccagatgttatttggatttctccagtttttccaataatgccctttttctgctcatgatccgatccagaataccacactgcattttgttttcctctctttgaaaccttctgttttctttaaagaccaataaactctcaaactccccaacttattctcctgtctggagagctcagttctaaaggacagctctgtgtgagccccaattccacaccctggcctcattaggacaccacatcctcccactccccaaacaaaggaacccttcaggccagccaaacaacagagaaaacagaagcttgttagccacacaggcccgaggctgctgacccaagttcttttttaactggaattcccttgaggaggatccacagatttaaaatgcatttggggtgtgctctctagaagcagagccactggtatttgatgtatgccgttctttgtacttaatggaataacttacgtgtgagtcagtgtgtgagagtagctgggggaagaggccaatttagggccaggatggaaattggccatgggggaggaaaggcctctgcaggagccagccaggccccaagatggtgccaggctttggggaagagggggctgtggccagcttgtcccagcctagcaggctgtgctctaatgtcagacaggtgggggtggctgggaggatcaaagtttctctgtgacctggtgatcaggttacagtttctgcttaaagcagagcagataagggaaagtgggggcggggtgggggggtgggattcacctgtcctgtcttcctctcggcctcttcgtgcagtctgctttgctgccaatttcttcttccccagagcgcctcccaggggctgttcccctcgccctcgtgcccaccattcaccaccagcactctcagagaagagaggaggtgtgcctgagaatttcacagtgtgccacactgtcaccagccttttttttgagcttctcccgatgacagagacacatcccagagatgtgaatgccactccttgggaaggattatccaaagacttcccagctcaatttaaaaacttcaactgtgaggcctctccctgccagactgggatggaaagaagtaagatggagcccctacactgaaagcactccccaggaaagacctgcagccagccatccaggacacagggcacagacctgaggctgaacaggggagcagaggggactgtgaaagctaagaaatgggcctggtacaaggaaagagcaggaatttgaagagagaggaacatcataggctatgcaaacagcctcccagggccagggcctcggtgaaggggagcggtgagaggaggccagctctggagtgtcctttcattttctctaaggagtctgggctttccacaggaggcaacatggggcttttcaacaggagtgacaagaatatttatgtctgagacagatcgctctggtaacagcatgggggctgtagtggagtggagagactgcaggcaggaagcagggggcaggttatcacaactgctcagtgagaaaaggagacaggacagcatgttggtcaaggtcatggctttgaatctggggactgggggtcagtcttggctctctctgacctaggacacatttctcacgctctctgaatttcatccataaaacgggcaaaacaattgtacctcctcacagggtgtggttaagatcaaataagttagtgatataagacacgaaacagggaacctggaacatagtgagggcgcaataaatatgaaccacaattcttaacttgtgtattctgtggactgcatctcaggaaagacggaattccagcggggaagcagaaggggagggtgactgtctccaatgcttttattgcagcctccaggtggaatagtgaagtggccaccttaactgcctcctggagtgtgagcagagaggaccaggacaaggctgcaatctgttggccaggcaccaactagcctgtgaggccaaccagggaccgcaggcatcaccaggaacaaggctataaaaaggcctcaaagagtgattacaaaattccacaccaggagaaagactcccagaagtttcccagggctcatacctgctgtgctcattaaagccacagtgttggctgggcgcagtggctcacgcctgtaatcccagcactttggaaggccaaggcaggcggatcgcctgagatcaagagttcaagaccagcctggccaacttgatgaaatcctggtctctactaaacatacaaaaaaattagccaggcgtggtggtgggtgcctgtaatcccagctatttgggaggctgaggcaggagaatcacttgaacccgggaggtggaggttgcagtgagccgagatcgcgccactgcattccagtctgggcgacaagagtgaaactccatctcaaacaacaacaacaaaacaacaacaacaacaacaacaacaaacacccatggtaaaacttcaacacttgtattaacatgtatttttaagcctgggcaacatagggagaccctgtctctacaaaaaaaaatttttttttaattagctgggcgcagtggtgagcatctgtagtttcacctactccagagcctgaggcaggaggatcacttgaggctaggaggtcaaggctacagtgagtcgtgatcgcaccactgcactccagcctgggcaagagggtgagaccccatctcaaaagaaaaaagttaaaattgtagattttatgttatacacatctttaaaatggtaaaaaagatacttgggaggcaagaggatcacttaagcccaggaactggaggctgggagacactccagtctgagagacagagcaagaacttgtgtctaaaaaagaaaaaaaaaggccgggcgcggtggctgtcgcctgtaatctcagcactttgggaggtcgaggtgggcagatcataaggtcaggagtttgagaccagcctggccaacatggtgaaaccccgtctccactaaaaaaatacaaaaattagccaggcatggtggtatgcacctgtaatcccagctactcgggaggctgaggcaggagaattacttgaacccaggagcagaggttgcagtgagccgagatcgcgccactgcactccagaatgggcaacagagcaagactctgtctcaaacaaaaacaaaaacaaaggtaaaaatgactacatattgtatgattccatttatataaaatgtccagaataggcaaatctatagagacagaaaatagattagtgattgcctggggttggaagggctgggggaaatggggagtgattgctaatgggtacggaatgatgaaaatgttctaaaactgattgtggtaatggctgaacaacgctgtgaatacaatgttttttaaaaaaaactctgtgactatactaaaaaccactgacttgtacattgtaaatgggtgaattgtatggcatatgaattatatctcaataaagctgttgaaaaatgggagaaaagctactaggaatgtgttcaatgtagtattatttaaaatccttagctgggtgcagtggctcaagcaggaggatcacttaagcccaggagtttgagaccagcctgagcaacataaaccttgcctctacaaaaaatacaaaattagccaggcatggtggtacatgcctgtagtccccagctactcaagaggctgagataggagtattgcttcagcacggaagactgaggctgcagcgaaccgtgatcacatcactgcactccagcctgagggacagagtgagaccctgcctcaaaaataaaataaaattcttaaaacttctcaaatataaaataaaaaagtgatgattaaatatagtatattgattccactgaatattatatagctattgatatagtttggatatttgtccccacccaaatcttatgttgaattgtagttcccaatgctggaggtagggcctggtgggcagatccttcatgccttgatgatgtctttgtgataattcttgcaatatctggtcagttaaaagtgtgtggcactccctcctccactctctctctctgttttttgttcctgttttcaccatgtgaggtgcctgctctcccttccccttctgccatgagtaaaagcttcctgaagcctcctcagaagcagctgccagtactatgcttcctatacagcctgcaaaaccatgagccaaataaacctcttttataaattacctagtctcaggtatttctttatggcaatgcaagaacaacctaatacagccattataagtaataattcttaaaaccatatagaaacattttgtaatgatgtaagaaaaaaaagacacaaaattgatttttaaaaaaacatgcatatggataatgcctggaagataaatgggaaaaagtgaaaataatcagtgtgttgaagtatttggcttaaaggcaaactttaaaaattttttatgttattactgttacaaaaagaaggaaagaggatattatacagcaaaagactaagaaagaaagtggcaaactaatgaccaaaactaaaagccagttatttaattcttccatcaaaaatagccaggtatagcccaggcgcagtggctcatgcctctaatcccagcactttgccacgctgaggtgggaggatctcttgagctcaggagttcaagaccagcctggccaacatagcgacctcacctcgtgtctaccaaaaaaaaaaaaaaaaaaaaaaattagccagatgtggtaacgcatgcctatagtcccagctacttgggaggctgaggtaggaagatcgcttgagcccaggagatggaggctgcagtaagctatgatggtgccactgtactctagcctgggtgacacagtgagaccctgtctcaaaaaaaaaaaaaaaaagctaggtataggctataggttagtcgtggtgcctcatgcccataatcccagcactttggaaggccaaggcaggaagtccacttgagcccaggaattcaaaaccagcctgggtaacacagcaagaccttgtctctaccaaaaatttaaaaattagcagggctcagtggcacgcacctgtagtcccagctactccacaggctgaggtgagaggatcacttgagcacaggatgtcgaggccgcagtgagttgtgatcataccactgtattctagcctgggggacagagtaaaactctgtctcttggagaaaaaaaaaaaaaaaagctaggtacaagctttcaagctggcctaaacataagtaagcttcattacttagtctgaacatacagacttaaggataaaagcctggtaaccccaatatctctcaaaaggcattttattctgaccaggcctccctgctaactctcccttgtcccaaaggaggtcacccagggtacccagctagttaaggaggaccaaactgagagccagtctggactggcacaaggggagatgcggacataaatgtacacgtgtttcacattccaaagccaaatacaatagggttctagatcatctgggaaattactcctattcatcaacatagaaaggtcacgaatatcaacagtgagaacaaacagggaagattacatttaaatgtaaccatatttgggcctggtgtgatggattacacctgtaatcccagcagttttggaggccgaggcgggcggattgcttgagctcaggagttcaagaccagccaacatggtgaaactccatctttacaaaatatacaaaaattagctgggcctggtagcacacgcctgtaatcccagctacttgagaggttgaggcacaagaatcgcttgaacctgggaggcagaggttgcagtgagcaaggatcacaccactgcactcctgtctgggcgacagagagggactctgtctcaaaaaaaaggaagaaagaaaaagaaaaagaaatgtaaccatatttaaatatgaagaagagccccaacacaagcatgtattcctgtttatacaatattcagggctaacagacttatcacacacaggttgtgtaacttattaatgacaatgtgactttaaacagtagttctaagtgggtcaccttgaataatacgaaacaaagcttgccaagggaaacatgcaaataagatcaaaatccaacagggaataggcattttcctagcttttcggatttttactgtagaaaaataaacacagtatctatctagtttctttagcactaaaaaaaccaacagcatgaaactgcattcttcaatgggggtggagtccaaagggacaggcccgacattattttcagcacactgtaccaagtcaagctggtatgtggataaagcagcacagctgggtttaccatgtgagtaacgggcagagagaacctaccaccctatgtggcgcaaaccacatgaggccagctgcagaggctgtggagagaggcctctctttatcccttcttctttccctccatctctttctgaggccaggacctgcatgcagacctttcttgataaagaactcaacctcaatgtgatacatcaagggaaacattccctgaagaacatggtggagcaaataaacatttggcctcgtgagaatggccacagaaaacactagggaatcttaaactgtcagttggatgactagatattttatgatattaaggattatgattaatttattttagatatgataataagctgttggctatactttttttttttttttttgagacaggatctcactcagtcactcaggctgggaatgcagcggcacaatcttggctcactgcagcctcaaccttccaggctcaagtgagcctcccaccctcagcctcctgagtagctgggactacaggcatgtgccaccacacctggctaatttttgtattcgtggtacagccagggtttcactatgttacccaggcctcccaaagtgttgggattacaggcatgaaccaccacacccagtcagctatacttttaaaaagattccttatcttttagaaatgcatacttaggtattcatagatgaaattatatgatgtctgggatttactgaaaaataatccaggataaaagtgtgtggggctatggatgaaccaaaactgccatgaattgataattgtagaagctcaatgatgagtatgtgggggttcattatagtcatctttttccttttgtatatgtctgaaattttctgtaacaacaaaaaaaatcagtaggagacagcataaaaccattcataactttgacccggcaatagccccctaaggaaataaataagggggaaggggagagctgattctgcaaagatgcataattgagaaaaacactgctgctcccaacaaacgagaagatggctaagcaacgagggtacatcaataaggcaaaaacgctacgtggctttttaaaatgataaatacttcagcctagtcgctaagtggaaatcggcataggaatgctaagaggaaaacaggcaggataaaatattatgtgcatactaatcaccacaaggtaaaaatgcatgctcacataatggaaagggtcaaaagagaacacagaaggcgacaccctccctttaacactcagctcgttgcctcctctcagtgagggccccagacggcccccgcgtgagcatgcacacacgagatgaattaattgcactcttctgggatctcacagtcctcacttgctgaggctcatccagcccctattgcttgtctaatggttcctcatggacctgccttccctgatgcaccatgaattttaccagcacacagtaggtattcaataatgtgtgtcaaacagaatagaacataaatagctgctgtctgtgtctcaggattttttttttctttagagctattcccacccacagtagccattcaggaaaggcattcctcagtatcagagaacaatgcttccatttctgattcacaaagtgcttctgctacgtgggtttatgaagccagcaaggcaaaacaaaatcaagcagactttctgtctagatccttgctggaccacacagaaaaatcccattttgttttgcaagcttgtaacaagtctcattgctatggttcctaataccaagtctgaagattccccaagcactgctgtgagaacgggcctttccttggctacttaaaaatgctgcatggctgctctctgtggctggcactatagtaaagggtacaagccagaatgcagtcgggactgtggctgctcagcagcgtcaggcggggaagtcaagaactgcccatctagacagaagtgggcagcaacacagcctgggccatgctccacccagtctgaatgtttctccatctcttctgcttagagctgctttgagcagcaggctttgggtgggtgagaggggttgatagggatattcaagaatgtcagagcctgggcgtggtggctcacgcctgtaatcccagcactttgggaggcaggtggatcacctgagatcgggagttccagaccagcctgaccaacgtggagaaaccccatctctactaaaaatacaaaattagccaggcgtggtggaatgtgcctgtaatcccagctactcaggaggccgaggcaggagaatcgcttgaacccgggaagcggaggttgtggtgagccgagatcgcaccattgtactccagcctgggcaacaacagcaaaaactccatctcaaaaacaaaaaaaagaatgtcaggaagaaatccatagactgtcatttttcagagcagtagttaactttttggataagatgttaaaggaagaatacattccctttgaaaatctgataagacctttccagagaattacacacacaattctgcacacactttcaacaggttattcaccaatccctggcctcagtcagataccacttctgccctagagctttagctgtgactgttggtatgaacacttagacaagttaaacacaacatgaatttccacaacagcaaggcagctgcgatgagtgaggtactacagagagtgagtgacagctctgttgggagggctgtctctgtgtctttatgaagaccactagcagagatacagagcccatgcctgggcacacacaggaaggcaagagcaccatggttaagacactccattccaaaaacaaaacaaaaaagacactccattctagttcttcagaaatgagactgccaagcctgaagtccttaaggttatcagaccatgagacagcctctttttgttggactggaatgctgacactactcattatgcagtcattttaccgagtgttgccttaagtgctccagaaagtggggtatagagaattaccaacatacaaactttagcccattctcctaacaaaaaccaaaaaattggtccagatggtcttaggaaatgaccaaatcagagactcttgtgaaagtggttaaaaaaaaggggggtctgggaatgtgtaggacctaactttgaacttggtaggcacaaggaggactgcagagaccctcacggtagacagacacctggcaggcccctcctgacacttggggctcctaagtctgacttattccacatcttgtccaagagataaaatacccttccccagcagcctcttgcaatcagctcatcaatatgccatgaaaatgttttgaaacaagctttggtcacatcactgccctgttccagccctttattaactttccttgtgatggtacaagaagggtatgttccatttacttccaaaaggaatttagggtaattttagtaataatttatacccaagacaaataaaacaagaaggctgaaaaccaaatggaataaaagaagaaatgttttaccaagaaccagagagataagacagttattgcaactagacactaattaggcccatgcttcctggtggcctgggcaagaagggaaagacaatgagtttccacagtccttccttgctgattaaaggcagaataaaaggcattcctctaggatggggattttttttccctaacagtaagttttgagatttattgcagtcactcatattaaggaataatgaatagcataatatggaatgtcttcaacaacagtttcatataaaatataaaatgttcttcctgtaacttagcctggtattaactgccctttaccatttgtcccagttacttttgcagcctctcttttcctattttgccccatcccatccccacaaagaactacacattcaaccaaaccagactcctctttccaagaacacatccccaccttttcgttactacctatttttacccatcctatcctctttaaatccttcctcttctacagatttccccaattctccaatcaaaagaggtctcattctaccacgcagcccatgcctctgcactgccaagcaaggcagagcaccaacaaggcaaagtcatgcagaagtggcagcaagatctttggagtcagaccaattgagctcaaatctgattcagctgcttatatgctgtgtgatcctaaccaaataactaaatgtctctgagcctcagtttccacatctatagaacagaaacagggcctggcacacaggagtcctcaggagaactgggggagcaatagctggcacaatagagacttgggtatctgtcttctctccccctcccccgtacaaaatgagctccttgaaaggcaatacaatgaagcatctcccagaagaccttacacatgaggggacctcaaaaatggagttgcagagttatctaaaagcctgactgtttggaattagatcagagagtctgacatgcagtagcttcatgccagatccaggttcagaacgcaaagctcctataactcctgggccaaactttacacacgtgacactgttagccccttgagggtctcaacacactgacttcctatttcacacaataaagatcctcttccttgtcagaaaataattcttatcatacaggtctccaaatacccatgcaaatcacattaatataacccgaggtggccaccttacccaaagatctcatcaaggggagctggtgtgtgtttaattgttatgaatgtatatcactgaccaatgccttgataaactacagataaaatctatcagttcttgatggctaatttggtacaacatgaatattgtgagttctaataactcacaggagactattctagtacttaccagctatatgtcttccacactcataaaacaaccataattacctttcatgggtgagatgttctagtaattcttaagtgacttaaccctagaaaatctatggaaaaagctaatttcaaagaatttttgttttgaaagtagaagacaagaccaagaacttatgaacatgctttttatttcattattcttattattttatttttattttttgtagagacagagtcttggtactttgcccaggttggtctcaaactcctggcctcaagcaatcctcctgccttagccttccaaagtgctgggattacaggtatgagttaccgtgcccagccctcttttttaacaaacatgccagaaaacatacgtccctttgtttcctggggatagatgaattatggtaatgttgtccctgggcagcagtgtaaaactgttttacaaacagttgaatcttctattttagaagttcccctcagaagtagcatggctgtattgttgggggaaagccaggcctctctggagcaggcatgggatgtggtggggaatgtactttggaaccagacagaactacatgcaaatcttactttaaaatattggggtaaggtgtttcaactccttgggcctcaatgttcttatctataaaatggagttaatactattaataaatatggaaatggttctcccattttattgtgcacccgaatcatctgtagagtttgttaaaaatatagctacatgagtcccatccccaaagattcaaagattctgtttcagtgcatctgatgtggggcccagaaatctgtggggatttaaattatttttcatttttaattgcacaatatgtaaatacatttcccccttgtaaaatattaaaacattaccttatcagttatgattgcattcagctgcaagcaattaaaaaactaacagtcgtttaaacagatgggggttatttttctcagggaacaagaagaaatctagaagcaggcagtatagagctggagtggatttatggaatccactcaaggattccataaaggacccaggaactttttgtcttcttcctctgccatccttggcctgaggcttccctcctttccatccttccagctgcaaggcaccactgctctacctggcagtctataaagcaggcaggaagaacacgaaagggccaaaggactttgccatcttatttatgaagaggtgctctcctcaggagctcctgcctcttgttcataggccagagctgtgtcatacagtcacccctagctgcaagggaaactaagtaagagaatatagctgggcacataggcaatccaaacaaaatcagactccgtcagaaaagaagaaatgaggaacaggtattgggagcctgtggaacagtgtctactgcaattacagatgaggttcatattcccttggggcctctttcccttgacccccatcaatcctggcctcatgggcttttcaccaagctccccaggaggttctgatgccccctaagcatcattttgagggccaccaccacacttacagtacttatgcagaggtctagatctggctttaaaatgtttagcctggtggagccataatagttgtctgatggatatttactctcatcctctttccttcccctacaagtcacccagaaaacccactcgtttgttacaaccacaactcaagtttgcctaaatggccttgctcagcatccaacactggggtgtgaaaaagtattggcttatttttttaatcaaatccatccttcaaaagatgatgatctgccaccctagacaatatttaaagaatgtgacttgggcccaaaacatggctgaagcatgagaccctgcctgagatgacagtattatcccacaaggtgactcactgcctggaaaggcttgcccctaatccacagacacatttagatactaggttaggaaaaaaaaatctgagtaggcaagtgtgcatcacacattaagtggggggaaatcaagacacaaactagtatattttttatattttatattaaaagtatgtacagttttatattaaaagtgtatacctggctgggcatggtagccattttcaaagtgctccaatcccagcactttaggaggccaaggtgggaggactgcttaagcccaggagttcaagaccagcctgggcaacatagtgagactttgtctctacaaaaacagtgttgaaattagccagatatgttggtgtgctcctgtagtctcagctacttgggaggctgagggaggggtatcacttgagcccggggatcaaggctgcagtgagctatgatgtcattaaatccagccagggagacagagtgaaaccctgtctcaaaaataaaaaccacacaaaaaaacagtatatacctaggcaaaggaacaaagcctgaaaggctagcccctgatacggtaacaatggcaaacatcttagtagtgagagtaattatgtcttactgtgttttgttttgttttgttttgtttagggggataatttctaaaatttttctcctaaaaatacatatttattttgtaacaagatttatgatttttaaaaatgtgtcgacctatacagccatcagaaataacaatatgcgatatttcatcttatctggtctttgggtaaaattaaaaggcaaataagaacggcatccaaagcaagggcatgactgtgtatgcagggcacggtgacaaggccactgcctacaatggtagtgttttaacaatctgaaatcattcagatttaacaggggaaaaccttcagaatgaaacacaggctccaggttcctgagatttcctaatagagaagctgcaaagagaaatgcgggttcattactcagccaccgtgctgcactcagctatcctgcacatagcaattagagtggaactcagggcaccatgtgcactgcatacaaagccagccaccctctgagaggaaccaaaatgcacaagaccccacagcatagaaagcagccagctattaagaaaagtttttccaattggtacattctcggcaaacccttgcccacaatttcctcaggaagcctctgtggctatcaaacaagcaaactaataaatacattaataggcaagatctacaagttggatgctgttaactttggggaggcagctgaactgtgagtcaggtctagggaggtaacttcatactgaaggctctattctctatacatctttctactctagcaaatgcttataatctgttggcaaataacagccttagctgagcttcttctgaaacaaagatgcccccagttgttaagaactccttgatttaaattgggcttgctgcattctgaacctcttcctccaaatctgaatggcagaaaagtgaccttctccacatcctcttactgctctttcttgtcagtagaccttgagcttgccgagctgtgctttccaaggtcctggtaactgtgcctgctctaggaggtagcttagaggactggagaaagcagaggatggtgcacctggaagccccaatcctggtcccagggacccagggcaagtcacctcctccctgggtctctatgggatccaatgcaaagctgaattatacaccttattataccatctctaaagtccaccaatgatgccatcatgctccaagagccattaggacataaggaacgaggtcacaagtgatgaaatacagttggcaaatcaacctaaaaatattcaacctcagcaggaattacagaaatgaaaatttaagtgaaatgcacttccacctatcaatttagcaaattctgaggaatgactcacactggtggtgcctgccttgtgcaacagtctgaactggtctcccagaagggaggtcttcccctcctatcctacccagtccatcctccacccagcagctagtggcttttctggaatgcaaatctcatcatgtcactggcctgcatttatagctcctttacggtttcccactgctgttaggacaaagtctacattctgtcacttggcctcgcttgctcctgccctgtcttcctctgcagcccatctctctccaccctcccttcggcctctggccttagctcccccaggcgtgtgcccttcagcagctctgggttttcacacattctgttctctctgcctggatatctaggacagtctctccccaccatcctatctgcttctactcttgttaacatttaacaccttcaggatgtggcctaaaacccttcttccaggaagttttccccaaccctgttcctcacactagtgcccctgccccaacctgggccaggttaggtggggtctccataaaaactaagcatatgtaaagcaatataaattttttggagaataagaaacttaaaaacaagcataccctttgacatggtaattctatttaaaggaatttattatatgtaaataatctgaaatgcaaagatataagccctaagatgtttatcactgcattaattataatagcaaggaaaaaaagaaaagaaataatctaaatgtccaacattagaggaatggtaacatgaaatgcaatgtattcatccacataagggaatattatgtagtcatttaataatgatatttataagctgttttttaattaaaaatgattattctatattaagtgggaaaaacagggcacaaaattgtacttacagcattatctctgtaaagaaaaatgttttaataatacaggaagaaaatacaccaaaatgtttatagtagtaacctttgtgtagtgggataatgaaaatttttctctacttctctacatttctttctgctttcaaattttcaggggaaaaaggctttttaacagtctaagttcaacctctttgattcttccacattgttctaaagctgcctcataccatgagggctcagagttgaactggcctcttgtaccctgccgtgctgacctcccacgatctttctgcttagggtctcctgacccatagcatgttgtgacaaatgccaggggagcagaaagaaggctggaggccatctgtccctgcagccccaaaggataaaggagagcaatgcctggcaaattgtccctactccagtggtacatattccagagttatctggcaggctattcaacatgaacccttcctcccacagaagtgatgatcataaaagcctaatgaattccctcctccggttttgtaacaagcattctactgtaatcctattcaaggaacaccgacatttttatttttatctttgatcagagtcaaccaataaggaaatggtagcctgtgtgccaatatccacccctgatgaataaccagccatgatcaatgcctcacacctgggtcccatcaggctcggattaggggactttcacaggtaagaatggtgagggccaaagatctgtagcaaatgaaggctgtcacatatgaaccagatgaaacaaaggttctttcctgcctttttgtgtcaccagtgggggagggcctttcccagtgattgaggaccccaagtcatgcaggctttgcgtcacctgctggtatcatgtgctctcagctcatgagcagctttctaaggctgacaaactgctcagcaatgacacacagcccacatgctacagtctcttttcctgcaggctgtaggaatgagaaagtgcaaggataaatgacactaaataatgcagaggtgaacaccactcatgcaagagcataacaaagtacatttgagagagctgcacagtggaggggggcatgtggaaaggttagcactccacactgggctccaaatcatagctcttaagcttaaagacagctcccgcattggtctccttcatgtctcaccagtccacctgcatctgacactgcctaatagagaaccacactccattcctgccactcacagaaaggtctccactgatgtccacacaaaggcttgactgggattttgccatacggtggctctgctttggagggctctctccagaacacaatgccaccaagagcagagacctccctctgtgttactccctctcacccagcgtggtgcaatgggaagaggagaggacccaggactacaggtagaaatgagagggaggcagttagatccaattaagcaagtcattttcatttaactggagaagagaccaacgtgggatgtgctgcctatgagataatgagttttccattactggaggtatacaagtctgggcgggtagccacctggcaggacgttctagaaggggtgcctgctgtgcctaagaccttgccctcagcaacccagagagctccttctacctcttagacccttggtgcctttgatttcactgcagtggcctgaagctgccttcttcactggtaacataaggctgacaacagtcccgctctgactaggatgttctatataataaatgactaccaggagaggcactggggaggaatacaggagccactcaatcctccactagagaatggagtgacgacgtgctctggaaaaagccaatgagactcaagataggcatgaggttacaaatctctccagattccacttctacccacatactcataaatgcacagggacgcaacccagcaggcagatagtcacaaaccaatactacctaacctttactgacttataatatcctacatgccttaactcattactttatttaatcctcaccatgaggcaaaggttgaaagggtttttttttttttttaatattttgtaaagaggtcttgctaaagtgaccgccccaccttggcctcctaaagtactgggattataagcattagccaccacacccggtctaggtcgaaacttataattctcactttctatacactggggtggggccgcccagagaagctaaatgacttgcccagacacacacacagcaagcagtggcacctggactagaattccattctgtctgacctctgaacccaagtgtttcaccaataagttataatgcagctactcagtaatgggatgaaaaggataaaatgaagaaccttgatatacagacagcctctaagtaatttgtttctacccattactgaagtatcttccatctgaattaaacctttgcaaagagaggccagccctctctagtgtgactttctctccctaacagtgcctaacttttggtgttgagacgaataccaggcaaaaagttggcagctggcttttagagttgaaaagaaccttaactttcatctgatgggaggcctcccagatgggctgtgcccagccactgcccacagtcacctcactgtacttgtgatagaccttagcagattctattcagtcttaaaaaatatatgacattatgagacaactaaaaattttgaacactagttggatacatgataggaaattacattttaaaagtacaatcacagtattgtgattgtttctaaaatgagtcattttcttttagagatacatattgaaatatatgctgaaataatatgatttgggggacttacttcaaaataatatgggcagggtatgcatattgacaaaatctaataggtcatgagttgataattgttgaagttctataaagggtttgtagaagttcattatactattctacttttgcatgtttaaaattttctataacacaaagtttaaaaagtaaatttgaagataaaattgacacattcaatattcttagagaaaagttaaacatagggcagagattataaatgtaatgaaagtataagtaagggaaagattcaaactcaataaacacatttgttgagtccccattatgtaggaggctctgtagtagcctctacttcctcatctataaaatggaagtgttaagaattctgctttgggccaggtgtggtggctcatgcctgtaaatcctagcactctgggaggccaagtcgggaggatcacttgaggtcaggagttcaagaccagcctggccaacatggtgaaacctcatctctactaaaaatacaaaaactagccaggtgtggtggcgggtgcctgtaatcccagctgcctgagaggctgaagcatgagaatcacttgaacccaggaggcggaggtcgcagtgagctgagatcacgcctctgcattccaggctgggcgacagagcaagactctatctcaaaaaaaaaaaaaaaaaaaaaaaaaaggaagaagagttctgctgcatagggttgttactcagatgagatgagcttatacgggtcaagcactgataagagtggctggcatatagcaagagtaatcaataattggtagctttatacaaccctatgcaataaatactattagaatcattttacagatgaggaagatgaggctcagaaaagtatgataacttgtccaaaaagtcatgctgccaatatgagggagaatttgaatttcagagtcagcactgcccccacccagctcagggatggactctggcatgccatagccaggagagagtcctgtgggtgcagagcatggagaagtcaggctttcagggaagaaatgagctgtgactcctgaacaaagagcaggaataaggtaagcctgaaagaatgaaggaagaaaagcactcaagaccctcagcaatgccattccgatgaagttcaaggcaaattcttttcctaattaaaggctggtctccacagctgtcattggggtgacctcgctaattcaaataaatagccacagggtttcaaagggaacagttttaactctgctttccataataaggattctggattacagcccaaagctttagctagttaagtgtgtgggtcagtctcataaattgttttcttggctggatcccaagaaagccagactgtcattcgagcaatgaggtgattggttttgcattcctacccaaaaaggaggcttctctatgatgcttgcaaatcatacttgtaagatttgtaccattgggattctcaatcttctgctaaaatctgttctagtgttttcttaggggaaactacacttctgaagatggctgtccagagatagcaccccagaacagagctactggagaccatttctccagtgaacaggtggaagggtcatctcagtaagaaaggcttctacgtttgctaactgccccttctctgagaactttggggaggggctactggccccctgaagttcctgttccaactcgaaattcttttccttacatgatggttggggcactactgctgagcaattccagagggctttgcaggaagtgggctttccagagggaagtgcaggaagaggactggtcgcagtccaaggatggcacttgtgtcctggctctgccctcggatgactatggacgactcccttatatgcttggcttccttgtttaaaatcttggttttaaacaagtttaaacttcatggcagcaggaaaacaaaacatatgtgaaaaagctagacaaaaagctgagaatcatcattacgctgactcccattaagccagaactagatcagatcttttagaatagggattccaagccacgaggagatatccacgggcagtctaagtcttccctgtgggtccctcacctgcccgtccctaaaggcagagtggaacaatggaaccagccaggcagtgagttggtcaggcctgggtttgatttctggctctgccacatttattatcttccaatgatccattcttagcaattttacagtggaaatggatacataagccctgtccatgcctcactaactcggctgactgaaaaacaaaaatccacagataacctatgaacctcattttgccttaaagagtttcagcctctaagccaggcgcagtggcatgcacctatagtccctgctactagggagggaaggtggaaggatcccttgaggccagaaggtcaagtccaacctggacaacacagcaagacctcatctctaaaatacaaaagtctcagccactttcccacaaaaacgtagcacaaaagagctgatgtgcatgaactttttatttgaatgttctgttctctctacttctctccattacaggggcttatgagaactaacagctcctaaaacgagaggcagaaagaaggcagaagatatggacaaaggagtctaaggaaaatttgtaatccagttcaccagcttataaaaaaccagcactagctgaaaacagcagacaaaagtaaggaccagacgaccctgatctgcctgacccaagatcagcatgttctttttcacaaggccacattgcaaggttccattaataaatagcagtaataaggatgggggccttggggtcaggcagacctgggctcaaactcctggctctgtaatgtattagccccaagatctcaggcaagttcattaatcctggctttaaccctcaatcatatcatatgtaaaatggggattaaaaactatatacttcgcaggattactatactaaccagaaaatcatatcaatttaaaggacatttataatactagttactaagtattaagatcttattatgggccgatatgtatgggccgatatgtacaccttcccttttaaatctcaaaacaaccctatgagggaggtattatgtcccccattttaaaaaatgaggctacttagtaggctcagagtaagtaatttgccccaaaagatacagtgttgggatgagaatgtgacttgggtttgtctgctccaaagactgttcttattgtcattacaatggtactataagcagtcacatcagcacggtagttagtatagaaaaggaagcagtcagaattccaggaaaggcttttgccagctttagtcgcgacagccctgggatgggccatcaccattccattttacagatgagaacttggggctcagagacatgaagactgttagaagtaaacaaaaagctgtttatcttttagagccctttatctatttcagtatttataaagtaattattataaagtaatatgatgcctggaatctgcttcaaaataatgcagagtgggaggggaggatgattagatgaaacaagattggattggccagatgcttagaagctgagtcatgggtacacagaggttcattacactgttctcccaattcatatctatgcttgaaattttctatgataagaaaaagcaaaaataaaaaaatacttcatctcctggagaaagcataaggcagaagcaggtctcaaactggggtatgttctgtccccaaattctgagtcctctccaatccactgtaacagtcactttaaaaaaccctttcttctttccatcttgatatgggtccaaagtgctgctaattagagctagggagttaggaaggcaaagcagtctctataggggtcagatagtggcagaccagcctgctgctggggtgcgacagagggctgaatcctgctgcctggagagtgcagaaaaggcctcagcaaggtaacaacacttgggtatggagagaatgtggatgatccaaaagagaatgtaggaatgtgaaggcaaaggagagaaggagcagccagtgcaaatgcatggaaaggggagcccgaaggctgagctgcctccagatctctcttggggattgctgctgcagcctcctcattgttatcacttcctccactctctctttccatagtctacactccacactgccccaggtggtctgcaccaaacagaaaatctgatctcatcttccccctaagtattaaaaacctcccagatctccccacttcacttcagataaggtctacactcctcaacctgatcctcagggtgactatctctaaccagccctgacttccacttcctaccccttgccagggccccacgtgaacatccagagcccaaggtctagctgccacaaacatacaggccccttttctccaatgttctctcttccttgcacatccctccccctccaggtaaactcctaccagagagcagctcagatgtcacctcctttgtgaaggcagtccttactctgcccctctcagtgcatgctgctacattatcagagcacccccacactgcacttgagggtcttcctctggatgagaaggtgggctctagggcagggagaggcagcagacaaggtgatcaatacaaggtgcttattaacactactagcgacataaataatgcagcccccggataggcaggcaggggttgtgcaagccatcatggtgcctggcacaaagtggctgccgtgagaggctgcctggtgagtggacaggtgaggacggcaggatgctgagcaaagggatgctgagcagagggctccttcctgaccttggctgaggcagccttgctgcggtgcccttcatgagtctgtaagctcacggctgcaggaggctaattcagtgcctaaaaatgctgtaacagtttctttgaaaggttccagacaaatggaaaatgacaccgacagcttgacgctcccttcacctccatggctgcaaacctaaagaatatttatgatccgtgggatcagagatttggtgtcttagaagcaaagaaaggtcacaagacaaactaacgcagaccatctgctcttgggtggggaaagagattcccatatttggagttattctccccaaagcaccaggcacctgcttctcttgtgaaaatctatgagctaacacaatgatttttatttaacatagtataaaaccaacgtctcctacaaggagaggtgaaaagctgaacacaaacatgccgactaacagggagctatggaagccttccggcggggaaacaggaggtccgcacttgtgctctccatattaaatgcttagcgacaaggcctaacagaggagaacaaatgctcccagagatgtctgcctgatggcaatggagaaaaactcatctggggctagtactagtggagctcccctcctcctccatttttcataggccggatgctcctgcaattcccaacaccgtactcctgacattgcagcagatgctgcccgcactgccgccgccacactaatccttcatcctccggggccaatggaaatgtaggatttcccattaatcagggccgtggacaccaaaatagctcatctgacctttgcaaataccaaagggtggatttaaagcagaaactggcaaaaggtaatgcaaaagtctttagctttcttttcagagatgattttatgcagtcattagctaagaaacagattgccagtaggaccaacaaggttaaaaattaggtggaaagagccaaatgtttcaccacacacacacatacacacacacacacacacacacactctctctctctctctctctcattccttgatgaattatttaacttacattaaaaatatatatatggctcagaaatctcttggcattggcactggattgaaaacagtgtcaaactgggaagtagctgttctctgagagaacacttatacatcaaaacaaacatggatttcaatgtgcaataccaggtggacttcatcagacaatacagaccacagatctgctattgatgaaaagatagaccctctcttagggagacccacattacataggatgaaacttcattaaacttccttatcacatacatacccatcttctctctatttacagcctatacatcttagttaatcattgatattttgtgagcaaaagtgaccttaatatttcacggagactttctctgcatagctataattcagcaccacataaaactggatcttaagtatcttaatgaaatgtaggactctttccatttaaaaaaagagaaaaagtaattatagaaaactggaagaaaaaagaagaaaagctagtcacataagtctgccaccaccctaattcaatcttttttctttttttattttttaaaaaagatgtctatttttgagacaaggtctcagtgtcacccaggctggagtgcagtggcacaatcatggctcactgcagtctcaacctcccgggctcaggtgatcctcccacctcagcctcatgagtagctgggactactggggtgcaccatcacgcctgcctggctaaatttttcatattttttggtaagacggggtttcatcatgttggagaccaggctggtctccaacccctgggctccagcaatctgcctgcctcagcctccgaaagtgctgggattataggaataaaccaccgcaccctgccgtaattcaattttgtataagagctttattgagatataatttacataccatgaaatctaccctcttgaagtgtacaattcagtggcattagtacatatattcacagagttgtgcaaccatcaccactatgtaactctagaatatattcatcatcctaaaaataaatcctgtacctgttagcagtcacttcccattccccctctcccagcctcctacaaccactaatctgccttttctctatatagatgtgtctattctgaacatttcttataaatgcaatcatacaatatatagctgtttgtgtctggcttctttcatgaaacataatatttttacccaattctattttttattagcactttgttaggtttctttcccatctcgattctgatatatttaaaacttaatcctttgctaacattataaagttaagtctgttttttgctaaaccacaagttactgaccctaagctaggctcatgggtgcagaggctgcaggaggcctgttttgctctctaaacatcagctcattatattggtctaagtattgatctaatttttttttttaagacagagtctcactctatcgcccaggctggagcgcaatggcacaatcttggctcactgcaacctctgcctcctgggttcaagccattctcctgcctcagcctcccaagcagctgggactacagggatgtgccaccacgcctggctaatttttgtatttttagtagaaatggagttttaccacgttggccaggctggtctcgagctcctgacctcaagtgatcagccctcctcagcctcccaaagtgctgggattacaggcgtacgccaccgtgccagcctaagtgttgatctaattttaacagaagtgcctcagggttaggaaagtactaactagttataccagccctcaggacaatcccacacagtaaatacaatcttcagcaaggaacaggaaagaacactagaactgggatttaaataggaagagctactaccatccagtgagcttttcagttttatacggtgggggggtctcactatattgcccatgctggtcttgaactcctgggctcaagtgatcctgctgcctcagcctcccaaagtgctgggattatagacatgagccaccgtgcccaggccagtgagctttctgttttgcaaatattgtaggctaaattgtgccatcctcaagttctcatgttgaagccctaagcaccagtacctcacaatatgactgattgaatttggagacagggtctttaaagaagtgattaagttaaaatggggccctaatccaatcatgcatgcacagaggaatgaccatgtgaggacacagcaagacagtagctgttggcaagccacggaaagaggcttctgaagaagccaaacctgcagcttgatcttggattttcagcctccagaactatgagaaaataagttcggttaagccttccagtctgtggtattttgttatggtagccctagcaaacgtctcatttaatgccccgacacatacttttaaaaataggacttctatcctcattttacagatgaggaagctcaggctcaaagaggttactggagctgggactcaaagtgaagtctgattttgaagattttgttctttccagaaagtacaacaagttgtattcatttttaatttcttttggtagcatgaggggtcacactgttaaaataaagaaaaatctttgttctatttttttttaaatatatactctttccagaatatacctggttacagtccaaattcagaatccactcatttcagaaatacttttgatggaggaaaagaaaattaatgagtcaagtgctttacatgcattatccaatttgaacattaaacaattctaagagatatatattagtcataattgaggaaactaaggctcagagacattaaatgactgtatcatgatacaatgtttgtctttcattaagttccttagtcaaatagtttcattttgaaagaccaagtgtactaaattctgtttatcaacctttcactgagacttgctgtactggataatcttgataccaagataaatacgccctagtccctaccttggagagagtgtcaagtacagctggggagggcaatagccccccagagctgctgctagcccatatggagcttctgtgcaatcaaaaaatgtgcccccttggccaggtgtggtggctcacacctgtaatcacagcactttgggaggccaaggcaggcagatcacttgaggtcaggtttgagaccagcttggccaacatggtgaaaccccgtctctactaaaaatacaaaacaaaaatcagccaggtatggtggtgcacgtctgtaatcccagctactcgggaggctaaggcaggagaatgacttgaacccgggaggtggaggttgcagtgagctgggaccatgccactgaactccagcctgggtgacagagtgagacttcacctcaaaaaaaaaaggtggccctttcttagagtgaaagcagccccagagcacagccttgctgagcagccctgtggctctgccttcagttcacaccccctcttgctaagagtgagatcagcggagtgcccagagcaaggcaggggtcctaggaagggcttgcttccccctatcaaccccacactctccacacccagcctccctcctattgcctgatggatcaaagacccccatgatctgtgctgaccctgtgaggggtggggggaaagagttggagtacagagccagggctgctcagagtaagtattgggcaaagccaaaaagttaagagtgccaagcaggggtcaaaatgccagaaggggccacatacagagtgactgtcccatagaccagagaatggggagctggagccatgaggtgaaagcaggtcagggacaccttaattgagtgttctcagggaccctccatgtgggtttcatgccatgcgtttctcacacaggagccttttaccccaaatatatttattcttgccacctgccattaagggtctccaccttcatcttttcccagtgctaggtgatgttctccaatggggaacagcagtgtggaactcgtgccaggaaaacccagctcaccatccacgacattactgaacatctagcacggcagagcatagagcatagggcccagtgcagacaatgccacatcacaaggcttcatctctgacaagagcctgtctcagcccccaaggaggcccaactgggtcaggagaataaatgttacaaagtgccccttccagcagctagagtcttacaggataaataccaccccactccgatgctacaatctgacctgtgccagggtgggtatatgaaaaaagttaacagggagtcatcagggcacctggggtgaagacagtggctctctggtcagaggacatatctcagtaagtgtggcatccaagcctcaccttgcaggagcagaatctcccacataagcgagaagcagatgagacagccatcctggggaaggaaggacagaagcaacggccagaaggctggtggtgtgtcccgaaaaggtgcacagtccagtggccagaaggcagaagagcactcctcagagagtggcctgcagatcaccagtgggcaagtttaggtgggccagggcaatgttataacactgaatctgttctctctctctattttttatttttattttttaaattttatttatttatttttttgagacagagtcttgctctgtcacccaggctagagtgcagtggcacaatctcaactcactgcaagctccgcctcccgggttcacaccattctcccgcctcagcctcccgagtagctgggactacaggcgcccaccaccatgcctggctaatttttttttgtattttagtagagatggggtttcaccatgtttctcgatctcctgacctcgtgatctgcccgcctcggcctcccaaagtgctgggattacaggtgtgagtcaccacaccaggcctatttttattttttgagatggcgtatcactctgtcgcccaggctggagtgcagtggtgcgctcttggctcactgcaacctccacctcctgggctcaaacaattcttgtgcctcagtcttccgagtagctgggattactggaatgcaccactatacccggctcctttttttgaatttttagtagagacagggttttaccaagttggccgcgcttgtctcgaactcctgacctaaagtgatctgcctgccttagcctcccaaaatgctggtattacaggcgtgagtcactatgcctagcctctcttttttttttttttagagacagggtcatgctatcttaccaaggccggcctcaagctcctgggcttaagtggcatggcactgcacctggtcgctgttccaatactttgtatgctcccattctaatgagagtgagtcttggcggggagccttaggcagacaacaggatcctgctagaagaatcttgctttgatttcaatgtatttatttattttaatttttatgttactttagattaatgccaagtgaaactacttttcaattgagagtgatagaagccttttaaaagaaaatgtgcccaagtaaaaaaagttagtcaatacacagaaaatctgtgacagcataggtggctcatagataagggaaaaccatgaaggtagtccccaggagaatggaaactgcaagatctgggaaaacctaggccagagccttggtgcagagggaaaagaaagatcagacactgcagtttcttctttctggtggcctatgggcagggaggacctaccaggaagggggtgctgtttcatcttccccactagggggaagatccctggcaggatgtctccagggatctacctggagccaacctaacaagccaggtaagggctttagtgtggggcagacctgttcaagttttggttctgctacctactccctgagaggcttctgggatgtcaatcagcctcatccataaatcctagatgataatacccactcccttgcggggctgcaaggaaaatgaccagcacccagtagacggcagttccctcgcccacccagccctttcctaactctggcagggaccagatctgagatccagtctctgagaacgttcataagatttagaggaaacagaatcatacttctctgttctgactagaattaaagaatatacaaaatgcctgatctcactttgtcttactgggttagagatgaaaaggaggaacatttagtacttgggtagacactgtagattctcaagcctcatgtgtcaccagtaaaatgcagggaatttgagtttgtgcataaaaagttgctgccctggagtggcaacagaaaaatttggtttcctcaggagtagcagacaggtaaggcaaataaataaaaaccatatgaaaattaactgaagaatggtgaccaaagggtttttagcaaaaaacctttcaagaaacgtaaaggtcttgcatagcctttttacagggcaaggggaggccaaggatgcaggaggaacgagtctgggcagctccaccagcaggcattctctacctctgcatttccatggggacgtggtgcttaggaaggaagttagccgaaggcaactttcatccacacatcttagaggtggttttccattagacaatgtggaccaacaaccaaatgccttttcccctcctcagatgtgtagaaattaaaagatgcccagtactgatgagagtgcaaggcaaacagtcactcgggctctgttggtgaggggctcatttagagggcaatttggcagtctccatcaaaatttccaatactcttatagtctgacatgagcattttgtccctaggaatctaaactacacaaatatagaaatgcacaaagatatgctgttccagtattacttataaggacaagaaagccactgcccaccaggaggaggatggctatataaactgtacatccattctgtggaatgcttgcacaatgagatagatctaattatgttgccatggaaaggtctccaaaatgtacaatgacatggcaaaacaaaagcgagctgtaaaatgaagcctacagtaggatcccatttatacaaaagaaacttcatggaacatgcgccacacactaagcagctgattacctctggggagcctagttgggctgagaaattaagggctcactctttatacagtaagtgcttctttattttctttttttttttttttttttttttttttttttttgagacaggatttcactctgttcccaggctggagtgcagtggtgtgatcttacctcactgcagcctcgaccttcccaggctcaagcaatcctcctgcctcagcctcctgaggagctgggaccacaggtgcgtgctgccacgcctggctaagtttttaaatattctttgtagcaacaaggtcttactgtgttgcctaggctggtctcaaactcctgggctcaggagatcctccagcctcagcctcccaaagtgctgggattacaggtgtgagccaccacacccagcctatattttataatttttaaaaacaaaaatgggtctctgtgtcagtcccattcactgaagggcaaacaaacagctttaggatgcccagtatgcacaaaagaccaaagagaaggcagcctctggggtagaggaacactggagtaagaagcaacatggaatgctggtcctgctgcaggaaggccccttagccacctgaggcacacttcctcctccgctgccctgacagaacaggaaggttgaaaaggtgtatacacattctcaaaagcagcctgcccaccacaatagggctgcaatggggcttctgggacgccatgcccaacagactggtccccaccccttcatttgggaggctgaggtgggcagatcacttgaggccaggagtttgagaccgcctggccaacatggcgaaaccccatctctacaaaaaaaatacaaaaattagccaggcgtggtggtcacacctgtaatcccagctacttaggaggctgaggcaggagaactgcttgaactggggaggcagaggttgcagtgagccgaaatcttgtcactgcactccagcctgggcaacagagcgagactctgtctcaaaaaaatataaataaataaaggtaaatgttatgttatgtgtattttaccaccataaaaacaaaagactgcagagagtcattctggtccttgagcatgaattaatcaggaagcagcagtttggttgctgcagtattcctgtaaggtgctagagacaagcaggagtgccccggatcactttccccacctcaggaggacagagaaccactgtccctgcaaaaggcgtcaccaactgtttaagaggcagatcccaaatagggaccaccatgggggcagagccttaagcatcacctggcccctaacccaggaggaaacctgtgccccacagcatgcacatggatggggtgtagaaacagcccacagctgacctcactgacctgcccccaccagcccaacacacatgaagacacatgagtggggggagcacatagggtgtgtagtgggcctcactgggtttcaatcctgttggttgtgtgattctgagaaagtcacaacacaggtaaaaatgccatctcacaaagtcaagagggttaaatgagataaaatcttgaaagaacacagcacagtcccctgcacaagcaggtgctctatgcatgttcattgccttgcctcttcttccaagtcacacaaggatgccttcccttgtaccctgtacagttagccactctcaggacaggcataggacagggcaagcattgttcatctttgaattcaaaatcccaccggctcaacatagtgcattcaaatagtcagataattattaaatacatataagttataagtgccactgcagttcagaggcttctgggccagctttgtggcagtgggaagatctaggttaggtttcaaagggtatattggtctaaaccatgagcaagagagaagggatgctttgcagggccaaaggccatgctgagcacagaaaaggagggagtgggaacggcaaagtaagtagagaccttggtaagagaaaagacgggaagaagcccagtcagtgaaggccttgaacaccaggctacatttataaatcattctttttttttttttttttgtgatggagcttcgcttttgacacccaggctagagtgcaatggtgcaatcttggctcactgcaacctcagcctcccagattcaaatgattctcctgtctcagcctctctggtagctgggattacaggaacccaccaccatgtcctgctaatttttgtatttttagtagagacggggtttcgccatgttggccaggctagtctcgaactactgacctcagatgacccacccaccttggcctcccaaagtgctgggattacaagtgtgagccaccgcgcctggccctatttataaatcattctaaaggagatggggagttccagaaattttctggtagagttgtccaaagttttggaaggttccagagtgtagaaagggagggagaatatgaaggaggagaccagctaggtggtattgaactggtctaacttacagcctcaagcaatggtccaggcatgaccaagggctggactaagttagaggaggagaaaactaagagcaaacacatgctaaacacattatgaaaacaaacaaaaaactctcacacagatactacgctctaaggccaagagaggtcccagaacctccatggcagtgtggctcctccatccatttgctcagccccttcctgacctccgtttcttttgctgttgctcaccctagagcaatgtctttatgttcaaaaagcatttatggaattgaaatgattgcatctcatgggcaccttgtcagaaatgtgccatcacaagtgacattttcgggtgtcatagttagtctctcatctgctggtggatctgatttgcccagctgacaagtgagaagactgtgacaccaacaattatagaaacaaactcaacctagaatctggaaatcaagctgttctctccacctcttctatcatactcagcagacaatatggtggtcaccggcagagggccctcacttctcaaaccacagcagctagtgggaacggcaggaccccagaccacacaattcctttttttttttttttttttttttttgtttttgagacaagagacttgctctgtcgccaggctggagtacagtgacgacatctctgctcacctcaatctctgcctcccgggttcaagcgattctccagcctccatctcccacgtagctgggattacaggcacacgccaccaagcccagataaattttttgtatttttagcagagacagggtttcaccatattggccaggacagtcttgatctcctgacctcgtgatcctcctgcctcggactcccaaagtgctgggattacaggcataagccactgcgcccagcctcttctttgttgttttttaagagatggagtcttgctctgccacccaggctagagtgtgtccagaattggtgggttcttggtctcactgacttcaagaatgaagccatagaccctcgcagttagttttacagttcttaaaggcggcgtgtctggggtttgttccttctgatgttcagctgtgttctgagtttcttcctcctggtgggttcgtagtctcgctggcttcaagagtgaagctgcagaccttcgcggtgagtgttacagctcttaaggcagcgtgtctgaagttgttcgctcctaccgcctggaattgttcattcctcccaatgggttcgtggtctgcgccagcctcaagagaaaaactgcagacctttgcagccagtgttacagctcataaaagcagtggactcatggagtaagcagcaacatttgtttcaaagagcaaaagaacaaagcctcccccgcacgaaaaaggacccaagtgggttaccactactgcctctggccccacccacatcctgctgattggtccattttacagagaactgattggtctgttttacagagacctgattggcctattttgacagggtgctgattggtgcgtttacaatccctgagctagacacaaagattctccaagtccccaccagattaactagatacagagtgctgattggtgcatttacaaaccttgagctagacacagagtgctgattggtgtatttacaatcccttagctagacataaaggttctctaagtcctcactagactcagaaacccagctggcttcacccagtggatcccacacctgggtcacaggtggagctgcctgccagtccctggcagtgcgcctgcactcctcagcccttgggcggtcgatgggaccgggcgcagtggagcaggggtttgcgctccttggggaggttcgggccgcataggagcccacggcagggaggctcaggcatggtgagctgcaggtccagagtcctgccccgcagggagaccgctgagacccggcgagaattccagcacagcactggcgggccggcactgctgggggaatggcacaccctccgcagctgctggcctggatgctaagcccctcactgcccggggcctgcggtgctgggcccgctgagctcacgcccacccagaactcgcgctggcccgcaagcgccacgcgcagcccggttcccgcccgcgcctctccctccacatctccctgcaagctgagggaggcggctccggcctcggccagcccagggaggggttctcacagtgcagcggcgggctgaagggctcctcaagcacagccagagaaggcatcggggctgaggaggcgcctgagagcgagcaacggctgccagcacgctgtcacctctcaagagtacagtggcacaatcatagctcgctgcagtctccacctcctgggctcaagcaatcctcctgcctcagcctccaaagtagctaggactacagggagtagcactaccacacccagctaatttttaaattttttgtagaaacagggtcttgctatgttgcccaggctggcctcaaatttttggcctcaagcaatcctcctgccttggcctcccaaagtgctgggattacaggcatgagccaccactcccttatacagcctttcaaaatggcaggtagagaaaacaatgcatatgattcttcttcaaaatatcactgggattcaacacaaaagagcatatactgtatgactccactcatgaacttctagaagagataaaagatcagtggttccctctgcagtgtgttggaggagaggattaactgggaagggacctgagggagctttctggggtgaggttgacagtgcgtatcttgatggggtaaggtgacaacatgtaagcatgtgtcaaaattataacaaaatgtatgcattttactacaagtaaactacctcagtgaaaatcattagaaggcaaatatatatacatttacacaaaatatatataaagtataacatatttatataaaatatatataaaatatgtatatgtatatatttacctgtgtgcatgtatttacatgtgtgtatatacttacatatcacaggctatacacacacacacgtacacacacatatgattcataggtatgtacagtctcttatggaaagctgtaagtcttaagaaaaactaggccaggcgtggtggctcacgactgtaatcccaggccgaggtgggcggatcatgaggtccggagatcaagaccatcctggctaacacggtgaaaccccgtctctactaaaaatacaaaaaattagccgggcgtggtggtgggcgcctgtagtcctagctattcagcaggctgaggcaggagaatggtgtgaacccaggaggtggagcttgcagtaagtcgagattgtgccactgcactccagcctgggcaacagagcaagactctgtctcaaaaaaaaaaaaaagaaaagaaaaactaaaagccactttgatttgggccttaagctttaggtctgaaatgaacttggaaagcttgttcaacctctgttcttcaaaacaaacgaacgaacaaaccatgctcttcaaatgagtaactgacaggatgtgccccacccaaagtctcacagcaaatcagcagcagagcagtgaacagtcccagactttcccagtcctagcctgggattggtttctctggtctggaccagtgccagaaaaagtagataaaacagaagaccattggtgattttatgagctaatttcatttaaaccatcaaatctagagctaaatagtacccccaaccaagcccagtcaaaaacaggagactaactttcaaacaataaaatgtatttaccttcatgaggctgagttgaaaatttccactccattaaaatgacagacttactaccccatgcttaccctccctgcccatatacaaatatctaaatgactggcaagaggctgtgagctaaataggaagacatgtaagagtcataaaactgagtcactgtgggaccttggcaagtctcctactgtgatacagtaagaaatatatatttggtctttgtccaggttcctggcacacctcacccaaaacccctggaatctcctgagagataagtgtcttttgtatgctaatgagattggggctccctagccagaaagaccaaggtacatttcagtgttggaacttttagccgtaccctcatcccaccttacctccggaaaggggagagggactagaggttgagttattcaccaatggccagatttaatcactcatgcccacataatgaaacctccattaatacccctaaacgatggggttcaaagaacttccaagttgaacacataaaggtgctgggaggctggcacagaagttctctgccccttccccacaccttgcccgatgaatctcttccatttggctgttgctgagttatatcctttgtcacgaaaatgtaagtaaagtgttgtcctgaattttgtgagccattcaagcatatgatcaaacatggggaaggcatcacgggaatccccaatttatagccggtcatgggaagtacagatggtaaccaggaacttgtgactggcatgtgaagtgggggcagtcttgtgggactgagcccttaacctctggggtccgcaccagctccaggtagttagtgtcaaaactgaattcaattgtaggacatccatttgatatcagaaaaaagacaaaaacaacaaaaaaatccctgcacatttgctgtcagaaatgtcatacatcacagacaccctctctggccttgtttccacaacctgcaaaaattagagggttggaccaaataccactaagaccctttcaactagagtcttctgattctttgaattgctggtttaagaatttccacagttagcataggagactctcgctctctggaagccactagcaaattcagctttcaaaccccaagcaacatcatttctcaggcctcatttcctatttcgactaatgacgtgccagaaatctgtgtgatttctcctttgaggagcagcaaaaaaaactccacagtgtcctattacaggacccagttcttgtccccagctctcaaagacagcccaattctctgagatgaaagaatcagtctctctccattacactcaattttaaaccaaaacccgaaacagaatttttgacatgcctcccagactacaaggcttatgcttcattaatgattaaaagagcagctggtgatgtcttaaaagcaagttggtcagttagacaatttagcatgtgtttaaattccgtcttttcctccatccatcactgtagttctaaggcaaatccaaagagaaagtaaaatacacaggtcttccattactaagaagtgcctcagcgaggatataagaaagcacgtcctttgaggaaattctcagaaaacttactggtatgaagaggacacttgtacactgagttacaggaggaaaactgaaactgagtacataatttacaatactagtgtaggtctggatttaagacaactattactagatttttcagctaccaagttcattcaggcattcattcactcaatcccacaaacaatactaagctctctggtttagtggttaagagcaccagctctgctgcccacagacctgggttcaaatccctgctctgccactgataatccacagaccttgaggaaggtacttgacttttttttttctgagacagggtctctggctctgtcaaccagactggagtgtagtggcacaatctcagctcacagcaacctctgcctcctgggctcatgccatcttcccacctcagcctcctcccaagtagctgggactacaggtgcatgctaccatgcccagctaatttttgtatttttttgtagagacggaatttcgccatgttgcccagactggtctcgaactcctgagctcaagtgatcctcccatcttggctgcccagaatactagtattacaggcatgagccagtgagcccagctggttatttcacttctaagccttagtttcctagtcttttaaaatatgactgacaggcctgggtgacacagtgagagtctgtctccaaaaaaacaaaatagagtgataatacctgccttacagaattgttgtgggaattaaagaaaagaatgcatgtaaactacataacccagtacctagtaaggagagacattctgactgctactaatagcaccatccttatctttaaggcattgtgttagattcgactgaaagataagggcatgacacggaaggtacaagcaacaaaagaaaaagtagagaaactggacttaaaacttttgtgcattaaaggacactataaacagagtataaaaaggcaacccacagaatgggagaaaatatttgtaaatcacatgtctgataagagattaatattcagaatatatagagaactcctaaaaccgaacaacaacaaaacccaattaaaaactaggcacaggacttgaacagacatttctccaaagaagacatacaaatggccaacaagcacatgaaaagatgctcaatatcactaatcatgaagaaaatgcaaatcaaaaccacaatgagacaccaattcatacccattaggatggctactataaagaaaaaaaaatgaaccaagtgcaggggttcacgtcctataatcccaacactttgggaggccaagatgggaggatcacctgagtccgagaagtccaggagtttaagactagtctgggatacatggggaggccttgccactacaaaaaaataattttttttttaattggctgggaatggtggtgcatgcctatagtcctagctactcaggagactaaggcaggaggattgctcgagttcagaagttcgaggctgcagggagctatgatcatgccactgtactctagcctgggtgacagaaggagaacgtgtctcttaaaaaaaaattgaagggccgggcacggtggcttacacctgtaatcccagcactttgggaggccgaggcgggcgcatcatgaggtgaggagatcgagaccatcctggctaacacgatgaaaccctgtctctactaaaaatacaaaaattagccgggcgtggtggcaggcgcctgtagtcccagctactcgggaggctgaggcaggagaatggcgtgaacccgggaggtggagcttgcagtgagcagagattgcaccactgcactccagcctgggcaacagagcgagactccgtctcaaaaaaaaaaaaaaaatgaaaacagacatgaatagatatttgtacattcatgttcatagcagcattatttacaatagccaaaaagtggaagcaactcaggtgaccatcaatggaagaatgaataaacaaaatgtggtataaacacacaatggaatattatacagccttaacaaggaaggaaactttgacatgctccaatagagatgaaacttgaagacattatgcaagtgaagtcagtcatgaaaggataaatactatatgattccatttatatgaggtttcataataaatatatgattccacttatatgaggttcctagagtagtcaaattcatagtgacaaagtaaaatggtagttgccaggggctggggggaggagggaacagggagatattgtttcacttttgcaagactagaagagttgtagagatggccagtggtgattgttgcatatttttttttttttagggatggagtctcgctctgtcacccaggctggagtgcagtgacacgatcttagctcactgcaacctcctcctctagcaattctcctgcttcagcctcccgagtacctgggactacaggcgcacactgccatgcccggctaatttttttgtattttagtagagacagggtttcaccgtgttgcgcaggctggtctcgaactcctgagctcaggcaatccacccgcctcggcctcccaaagtgctaggattaaaggcatgagccaccgcgactggcccaatgtgaatatatttaatgccattgaactgcacacttaaaaccagttaaaattgtaaattttgggcctggtgtggtggctcacgcctgtaatctcagcactttgggaggctgaggtgggtggaatcacaaggtcaagagatcgagaccaacctggccaacatggtgaaaccctatctctactaaaattgcaaaaaatttagctgggcgtggtggcgcgtgcctgtagtcccagctacttgggaggctgaggcaggagaatcgcttgaacctgggaggcagaggttgcaatgagccgaggtcgtgccactgcactccagcctgggcaacagagtgagactccgtctcaaaaaaaaaaaaaatgtaaattttgttatatatattttatcaggttttttttttaaagaataaatagaaacaggtgccctcatggaacatttagtctaaatgatgtaaaacataacaacacattttgcttttacatactcacttgacccctgtaagatgtgatggtgcaagtgttcttgtactcccttcaccaccacagtttacagattgggaaactgagttttagcacagttactggactcatacaaaagcagtcgcatcgagaagcaaagatgggactgactccaatctagaacaaagagtgctaagtgctggaagagaacaaagagagagcaatgggaatccacattcctattggtggaactatgctatctttctggaattcctatttgaaatcagtttaggctccttcttgtccaaatggaaacagaccatgcttgatgtctaaaaggcaacatgaacaaagaaaaacgctggagctagagcccctggctggagaggaccgctccgcctacttgagccaggaaaccttgggcaagtttctgaacccctttaagtctctatttcttcacctgtaagatgaagataacagtgcttccagagaaaaaaatttttaaatgagataagtatgcacagcactcagcaaggtgcctggcacatggtgaggggccaggaaatgatggctagtaatgttagctttcaaagatgctaaataccagtgacaaaaagagtgaataactatgaagaatatactctaccatgtgctgtgaaggtcacaaggaaacagaaagtagaggagcctccagccttattcagaaggtatggcaataaacacatgataaataacacaagataaataacaacagtaacagtggagggaaggaatcaagaagtctatattagttgattgcaggacaccgtgctagggattttaagcacattatctcatttaatcgtcacaaaaacctggaggacaagtaatattttctgttttatagataagagaagagccaaatgaatgatatggatagcaagcactgtgagctcagagaagagattcatcaccataaacagggtggtctaggaaggctgcctgtaggaagaggtgagggctgatgggcatcaggcttgatgactgaatggagaaaagcagagaatctcctaaatcaagaaggttggagggagcaataacatatgtaaccaagtctgagactggttttaaaagtcgcctcttttaacctcaacaagccgggtcagcaggaaaagcctgaatgttatttatatcttctcagactactaggttagcgcaacatttctgggtgatttatctgctaggtcaagagcaacaacccctaactgatgctcctctgggcaatgtatttacaccgttttcctttcctaatatcccaagtaaataaataaataaatgtagattatacagaaatatgctaaaagttgttctacaatgtcgcctcttcaaggcatgagaagatgaagagtgaaatacaaaagtattccattatgtgaaataagcatctcaacaaatttgtgaggacgcacattgtggagatttttttctcctttgcattttttctatatctttcatattttctatcggttatacatcgttttgtaaaaagcacaatgaaaggctgggcacagtggctgaaacctataatcccagcactttgggaggctgaagcgggaggatcacttgagcccagtaggttgaggctttaactacgatcctgccactgcattccagcctgggcgacaaagcaagaccctgtctcaaaaaaaataaataaataaaaagcacaattatatgagaattttagatattccgatagcccactcctaagcagtggcattcctctagaaaagccctgggaataggtcagccctgtcattgcatatgataaacagagcaggaggaggagcaggctgacgccccacgtgactttcaatgtcaggggttttaagacctgtccaggcaattaaggacaaatgctctagactagacttcttctcaatgctccatcaacctgccttggcacctttctgtttctgagggggcttcatagacagtgtccctacccttgaccacagctgacatcccccctccttcccccaccttccctccccaattctgcacagaagcgggctttcatggtagagagaatgatcttctggtgactgctaaggagaaatctccctacctctgtaatgatattcatgcttccatgctattcccctccctagaagtctttcatgcctccccagtacctctaaaatatagttcaaactacttagccaacatatgaagcaagccctccacacaatcaggccttatcctcccttcccagtctcaccccctatcactcccctttgctaggcacacagaataaatcccatcacccccgcctacctcttaacatccagcatttgctcaagttgtctctgccaagaaaccaaacatccttttccatttctacacaaaccaaatcctccccattcatcaaagccctgctcagcagacaccacctcctcagagttttcctgagttcttccttccctcctacagtgttcctcctcactttactcttgctgagggcagcacagcgtgacaggataccagctctggagccagaatgctgcattcagactatagctccctcactgctagctgtgtgaccttaggtaggttccatactttctcattgtcttaatgtccccatctgaaaatggagataatcacagtaccttcctcacagcattgttgtgaggatcgaatgactgcaagatgtataaagtgcccacttcagtctctggcacataggaatacaacattaaactttttttaaaaccccaaaaacggggccgggcatggtggctcacacctgtaatcccagcactttgggtggccaaggtgggtggatcatctgaggtcaggagtttgagaccaacgtggtcaacatggtgaaaccctgtctctactaacaatacaaaaattagccgggcatgatggtgggcacctgtaatcccagctacttgggaggctgagacaggagaatcccttaaacccaggaggtggaggttgcagtgagctgagatcgcgccactgcactccaccctgggcaacagagcaagactccatctggaaaacaaagaaacaaaaaaacaaacaaaaaacccaaaagcctttagctattattattaccacctgaggtcacccctcccctcctacatttccttactgcatttatctatccaatcttgcaactactttctatctgatctaatttagatacctacacactgggaaattctcagcttgctatatacagatagtacagggccactgaataaataaatgaacaaattctaaataatcactcttttagcctgtccacaagaaaacctacatttaatgtttgaagaaagataaagaaaagattaaagaaacagaacttcaaagcaagaactacagttctcgaagtgaaccagtagcatcagcatcactagagaacttgacagaaatgtagaatgctacttcccaccccaaacctactgaaacagaaactctgagggtaggatccacttttaacaagccctccaggtgattcccttgcggctgaatcatgagctcagagtgcaaaaagtaacataaatggcagcacagaatgagcactggatcaggagtagattctaggcttcactctgccattgaccttgcacaagtctcttaacttctcagagcctcgatttccttatgtgatacagggatgataacacccaaatagttaaatgttgtgagggttaaatgagattctatgtacagagtttgcatatagttggtacttaataattataagttccttccagttatcttcctgtatatctcacaaggttgtgaacactaaataaaatgactgaagcaaaagggctttgcaaattcctgcccttgaacatcagactccaagttcttcagctttgggactcagactggcttccttgcttctcagcttgcagatggcctactgtgggacctcatcttgtgattgtgtgagtcagtactccttaataaactccccttaatataaacatctaccctattagttgtgtccctctagagaaccctaatacacatagcaatctgagggacaactaactattcttggtacaaatagccaggttaaacgtctaccattcacaggatattatgaagtagtttatgtccaacaccagtcagtctacaaacaaactctgcaacagaatatctgcttcttgcctgtttattaaagcagaacaatgaagagaatacatgcccaccacccccaatattctggtcagaattaactaactactcactgatctttgaatctaaactttactcttggaaaaggattttctgaaaactttttctagccaacacaaggaaaactgcaaactgctgcagacacaatggacctgacttggggaactccccatgtatgtcatccaactccaagcagttgtggaaggctgagattaagacagttaacattttgaagcttgttgcagaacagaaaattaagaaatacaagtaagtactctttcttccaccacacttcttagcctcgcacaccatggctaggctttctctctcttttttttcttttttggagatgcagtctcgctctgtcattcaggctggagtgcaaatggcacgatctcggctcactgcaacctccacctcccaggttcaagggattcttccgcctcagcctcccgagtagctgggattatacgcgcgtgccaccatgcccagctaatttttgtatttttagtagagatggggttttgccacattaaccaggctggtcttgaactcctaacctcaggtgatccacccgccacggcctcccaaagtgctggattacaggtgtgagccaccgcacctgtccagcttactctctccctaaaccatgctttctactcaggaactgccctccagaataaagggcgggatggatgcaagaaatgcacagttaactatgtcagactgtggtcttagccgctaacttgagatgaacacgctaagtgttctactaaatcgtaccaggttagaatgttcacatgaggcccacgcataagacagagtaagaattactccaccaaccgctcagacagacccaggacaccttttgtgagcatgttacctctaccgaaggctccctaagagcagcttgttaatatttgtatccccagagcctggcacaggcctggccccccacaggcactcataactgcctactgaagtgaacagacaaaattatttaggtgtaagccccatgcagctgttgagaagtattattttataagcagggaaaattaggtccaaagagactaaaagttgaagtcagttaaagaacgtagtctttgggccgggcgcaatggctcactcctataatcctagcactttgggaggccaaggagggtggatcacgaggtcaggagttcaagaccagcctggccaaggtagtgaaaccttgtctctactaaaaatacaaaaattagcccggcacggtgccaggcaccagtaatcccagctacttgggaggctgagacaggagaatcgcttgaacttgtggggcggaggttgcagtgagcttagatcgtgccactgcactccagcctgggtgatgaagtgagactccatctcaaaaaaaaaaaaaaaaagaatgtagtctttgatgccacccatccagagcagggcttcctcctgtgcccaaaccctacttgccaccactccccacagccacctctgctccattcagactggtactcacagatgtgcctgtgccccactccctgcctcattcagctgtccctaggcccaatgatattgttttctgcatgcagagttcctacccatcctttatgaacagccctcagactcaaagaagccagtccctgtcaccccagcctcttctgaattgtttctgactccttcagcacttacaatctacaccactcattgtttcatgcatctctgtcttctctcctgaaaccgtaaatccattgaggacagggatcagagagggaccagctctccttttttttttttttttggagacagagtctcactctgtcgcccaggctggagcgcggtggcacaatcttggctcactgcaacctctgcctcccaggttcaagcgattctcctgtctcagcctcctgaatagctgggattacaggcgcccaccaccacacccggctcatttttgtattactagtagagacagggtttcaccatattggtcaggctggcctccaactcctgacctcaagtgatccaccaccttggcctcccaaagtgctgggattacaggcatgagccaccacaaccagcctacagctgctgtttttaatcattagctttgtagttgttattttatttctgtattccccctccctcccaccaatcccccacccccgcacattcttttaaaagaatactaacaacactaaatatcaagaaagtcactttgacactttgtcacaacagtacggaatatacattagaacctaattctgtccattaatcatttacctgaactgaactgaaatgacctattggctacctggcagtggggagccatcatcatctttagtcaagcatcttatgagcaatggtgaatcctggggcctggtagggtattttccttcacaggtcacagacgggccagttgtttcacatatcctctccagatagaaaatccaaccctaacttaaatattctgttattaacagtggcagtttcaatttactgagcttctactatgttccagatactatgctaagtgttttcatacattatctcatttaaactacattactctgtgaataggaatctttctctctctctctctctctctcagaagactgacaaactaaacctcagaaagcaacacaattttctggggtcacacagccaagaaatgggggccaggtcaaaattcaacttaggtctccctgacagaagtatcaagctctttccacttgctatatatccctatatctcttatatttggttttttgttgttgttgttgttgtttgtttgttttttgagacagagtctcactctgtcgcccaggctggagtgcagtggcacaatctcagctcactgcaaactccgcctcccgggttcaagcaattctcctgcctcagcctcccgagtagctgggactacaggcgcatgccaccacgcctggctaattttctttttttttttggatttttagtagagacggggtttcaccgtgttagccaagatggtctcgatctcctgaccttgtgatccgcccgcctcaacctcccaaagtgctgagattacaggcgtgagccaccgcacccaaccacatttgtattttaaatcccctttaacttctacccctcatttactaccttgtcattttaaaggtgtagagcttcctattataaaggggacagaaaggaaaacaattctcgcaagttttctggctccctccattaactggctggaaattagtttttggagtgtggctgccatgcaagagcacctgaagagagtggaaaaggacatggggaagaagtaaggaagtgagaatccagagactctccagtgggcagcaagagacaagatgtcaaaaaggtgggaaaacactcttttggggtccctcatgcattataaaagatactacgccagaaagtaaagaaaggctcctaaatgctaattagccaacaggagagacctcaataagtttataggctccactaaaggctggaaagtaagctaaaatttcataagcaaagcagaaaataaacaaatcactactgctgaaatcaggcccataagaacaccaaagatcctggctcataaaagacgttttaccagtccttcaaccaaccaggaggaatccagttttcaaacaaactaatcagcattcttgactgatcaagtggcataagccactgccttgggtaaaaaggcaagttgctttcttagtaaggaagtcccatatggtggccatttcagtattcctttacctacactttgggctttccttatccatgattctggccatctctggtgtccccaggtgtccacatcccccctataggattaacagataatgctgagtaccattctctctacattgccaacaaaagatttcagctttggtaaacttaatatgaggtgggggaggaagcaacagtcaatgtgcagagtactacaaagaatatcaaaacttgagaactttaagggatctatcacatctcatctccaaacactttgacagacaggggaacttcaaaccagaaagggcacaaggtcatatggagtcactgacaaaaccactgctagagtccaggcttccatgattcccagtccagggctcttatcattaaataacacagcctcccttctttcctgggaggcactgcaggcatgccatccccctgccaagataatcaccctccaagagcccctcctcctatcccagtccctcctacagcacagctgagttgcagctcaaattagcaagtcccggagcagggggcatttctgggagggtgcccagtctgagggttgctggtaccgaagaggagggacaaagatggagaagaaggtgacatcccacaaagggtttgggagaactgggtccttggggcagtggcagtgagcctgctgggctggataaagacacatgcagtggcatctcccaaagcgcattggggaagcagaccagcagttggcaccacctctagcagcaaaaggaagggctgagccttgatgggcagggaagcctggggcatctccgagtccaagttgggcctcaggggtgcctcctggcagagtggcactggcgcgcccgtgaggtggcaccagtgcccgggaggaggcccgaggacacagatgccctgcctgcccgtgggatagcaccggcacccggcgaaggcccagcccccccgggaggtggcaccggcgcccggcgaacgcccgacgaccaggatgcccaacccgcccgtgaggtggcaccgacgcccagtgaaggccagacgaccaggatgcccagcccgcccgtgaggtggcacaagcgcccggcaaaggcccgacgaccaggatgcccagcccgctcgtggagtggcacccgcggctggcggaggcccagcccgctcgtgaagtggcaccggcgcccggcggaggcccgcggtcctcaccagccggatcagcggccgccgttgcccagcctcctgccccacacgcggccttaccgaggcactgccccactggtgtgctgaacgggttccccaggaggaactccatcttgggtggacaacacgcagcggcccgggccccctgtctgccacctaggcctccgctgtaacccgccggactcccgtcctgactgacacttgccccctccccactctctggaacgccgagcttagggcctttggccccgcccccttgccgcgtctctattgggggacacctacgaagcccgcctcctattggtcgttacacctctgtcagcaaagcccccacccaccccgcagcgtccgattgggcggaggagcgagctaggtcaccggagtccctgtcagccgtggcggcacctcccctggcccgcccccaaaggggaagctgcgcattttgattcctctgtatattggtcaatctaaaggattcttactattattggacaaaagacgagtcaatcacgcaaatggacggaacagaggtgaatctaggaatatccccgcccatagaaagtactgattggagaaacatttgttttctctacggctggttggtgtaaggagtgtttcaccacacggagatgtggtcacgtgacttgtcaactttcacccaggatgtctcccttctgacttccccttagcaaccaagtcgcggcgcttggttccccagcaaccgggagacgcgtctgctgcgtggaaccgccgagttcccagcgcttgagaaggtgagacctgggagctgaggctcccggaggacttgcagggacagatagtgcccgacgtaactctttcctgtgacctttttctcggagaacgccggcccggcccttctcatttataaaatgagcacgtaggtcctctcccagccactttacagtcgtgtgagacagccaagacactttagtcctgggcttgtcaagcttttgaataaaaaaaaaaaaaaatactaaggaagcatttcccgagggagcagggccagaatggatttttaaggggttccgtcttccagcctcctttcatagaaagagaggtacccggtccactgataacttttcccagaatttagccatcataactgacctcataactatcaaatgatttcatcttggtactgtatataccgctttggatgtgaatacggctactcaagttctgtatccgtctctgtcagtaactcattgtacgactttggacaagttcctttacctccctggagcctcaggttccctagctgggaaataagggcattaggactccctttttatggcctccggagcttacatgtacttaaataatgcatgtgcactgagcacacagtaagcattcagtaagtgattgattttattcttttttaagaaaaattttgttcattatttatttatttatttattttttatttttaaaaatggagacagggtcttcctatgttgcccgggctggtcttgaactcctgaactcaagcagtccttccacctcggcctcccaaagagctgggattacaggtgtaagccatctcgcccaaccaattttctccttattaattcatggccaatagggactatagttttcagatcctgttgacttcaggttatcatttcccaggaaaattctggatctgttatctgtgaggaggccactccgttgacagttgtgtaaaactctgctgctttccccagctccaacctctctggtcttcaacaacactatcatcaggcaagtcaaaggggacccaggttgggtggtaaactataagatccccatagaagaggactgtttgggccttggccctgaacccaggacaactgtgagaaacactgtgagctgtggcaatgatagtccccagtaccctggatacagttgagtcatgattaggaaaatgaactctgccacgtgctaagtgtatgaagttgggcatgttaattaacctttttaactagcttctgttttcttatctggatattggtgagtattagccctacatgtaaattaagtttctagaaatttctcccatctacatcttgctaacaccctggtcatctctcacctcagtacttttgcaattctcagtactgttgctagagtgagcttcttaaaaactaagatctgatcacattgcttcccttattttttttattttttgagatggagtttcgctcttgttgcccaggctggagtgcaatggcacgatctcggctcaccgcaacctccgcctcccggtttcaagcgattctcctgcctcagcctccagggtagctgggactacaggcatgcaccaccatgcccagctaatgttgctgcccttattaagccctaggtgctttccagggattctaggataataacaaaactcccacagacctctccaaacttgcatcacttcagccaaagtgcaacaagtctgttctctcccacctaaagggcctttccacaaagttacctcctccttctttcctgcttgtccttccaatcagccctgtcttccttggccaggccaggtgcccctaatgtacaatttcatagttccctacacctacaaattgtcatggtttgtagttaaatatttgtattattgtttgattcatgcctgaagctgggttaaagtccgtctgttttattcacagcatatagcagttactcactacccatgtgtggactaaatacgtgatctcacacaaatgcagaagggagaaattatccaccttttacagatgggaaagccaaggcttagataggtgaagtgagttgccaaaagatgcacagtcaggatccaaatcctgctctgatgtgcttaacaaatagcatatgtaataacaatcccccatttcctagcatagcaattgctgggcttgactgaaagcaaacttgatctgtcacaggtaccaggccctgatgaagtaggagggataagtcagttaaagttttgaaatcaaaattaagagtcatttcccaaagtatagcacctttttttttttttttttcttgatggagtctcgctctatcaccaggctagagtgcagtggtgcacgatctcggctcactgcaacctccaactccctggttcaagcgattctcctgcctcagcctgtcaagtagctgggattacagacatgcgccaccatgcccagctaatttttgtatttttaataaagtcagggtttcaccatgttggccaggatggtcttgatctcctgaccttgtgatccgcccacctcggcctcccaaagtgctgggattacaagtgtgagccaccgcgcctgacctccccaccccccccccaaaaaaaaggccaaacactttgcagaaaacatcagccaaatataacacattaaaattcccccaaagacaagttgatgacaagttatgggaaaccgcaggggaagccattgcataagagtggggagctagagagaggccgaggtctggaactgtctttgggggtagaatcagtcaccccaacgaggtggagccagtgtgaacagattggagagagtgggaggaaaaggaccaaggtcttgggaggacggaaggcacaggtggagaaggggtaggggttgaagggtgtggaggctatgcctcccctggaagcaagagagaagtgtgcacaagagctcattgggacatttgatgagggacagttcagggcagaggatgcatatttgcagaagctgcatccaagtggatggtcagggaggcaagaggagggcagtcttagagggaagtctctaagaccaggtaacaggattgtatggcccaacctggcttttcagcagacaccatcagccctgcaccaggagtttctccagcagtgcccagtggaatgaaaaacagagcacaggggctgcctagcatcagggaccagcagggcagaaggacaggaggttcagggaggcccagatgctgggaaggcatgtagacaaagataggaagtagggccagcagggaggcaagaatcaggggtggaaagtgggggaaaatatccctcctggatgtcctcaccaagagggttgataaggatgagaatgtggtccagccacgaacggcagcctggagtcagcctcacattgtgactgaccaaatctacagatcccccctgtgctgtggtgtctcagtcaaatccctctggaccattagcaacagaatctactggaggctgggcacggtggctcatgcctgtaatcccagcactttgggaagcggaggcaggtggatcacctgaggtcaggagtttgagaccagcctggccaacatggtgaaaccccgtttctactaaaaatacaaaaaattagccaggcgtagtggtggacacctgaaatcctagttactcaggaggctgaggcaggagaatcgcttgaatccgggcgttgcagtgagctgagaccgcgccattgtgccccagcctgggcgacagagcgagactctgtctcaaaaaaaataaattaattaaattaaaaaataacctactggagctagcttaagtagaagaggatttcatgtgagaaacaggaaactctcatgaggcctggacctagggacattagggactggaaagccagcaagaaggaggcagcctctgtctgtgtcgatctgtctgtcctttgtcttttgttttctgattcccaggttcccatctctgcttttctctgtgcatctgcctcctccccctcttgctctctgcttaactatgtacccagccagcccacactccctattcctccccagctcaagcagccagctccgatgggcactctcattccacagcctcaacttcacatctcccacggggaggacgtgaatgggcagcttgggtcaggggctccctctgcaccaggagaagcttgtggtgtggtgtggggcatacacacatgacggcctggagggggtgaggtgctcaaggaagaggagctgcaggctgacaggcctggctggggctgcccagggagcacagtcagtggttggtacccacaagcccaagtgaggatgggcatacaaagtcagaggcctgacacagggccacagtcataagatgagtcaagatcacaggctagggagaccagtgtggacaccagtccagtgggtccagcgagggtcccagctgtggctgtagggtcaagggatgaaaccctgtggacaggcccaggtggttgccaggaagccctggagcagccttggcgtaagtatacaaaccccgagatgcagcagacccagggctgggcgtggggcattcctcagagtgccagtggccacaagacactacagggggaaacctcagccagaccctgccctcaaacagagaaagaagcaggccgtgaaggaagaatgcggtgttttttagggaaaacgtgggggaagatgaaccagccgtgcaactcgatggagccgagggtgatggacgatgacatgctcaagctggccgtcggggaccagggcccccaggaggaggccgggcagctggccaagcaggagggcatcctcttcaaggatgtcctgtccctgcagctggactttcggagtatgtatccaaggttcaggggtggtggccagggtgggccctccctggctttctctgctccatcttcaagccccaggattccatgcaaagtccacggtcgaggttcccacatcagcattagggcctacctgggttacaaggcataggagcagcacagatgtttgtaaagcgtcatacttagtgtcttcatcatttgaatatccacgacgctccggattctgaataagaatagaaaacaagataaaattgtcccacgccaaatctaagtgagcccccaagactatgctgtttccatcacacaactccacatgggtgtccttggagtgggggtccctggcaggcagagcctaggaagtcccacgtagccagaagcagagggtaggaagtgtgggagaatgagagcgggcactgggatggcagcttcagggaaggggtgaccaaagacaggctggtagcaggaggagcacaggcccttgaggcagggaggcacatcaggagtgagaagatgtggctcaggaccaggcggaccctcactgcttcaatgtcccgtctgtggaatgggatggctgtcatccctgtctcgagcattgggtggggggacaaggtgagacagcacgtgcacagtgcctggctcacacagcaagccaggcacagtaagtgaaggcagaggcagtacgagggcagtgagagaggtgggcagggatcctgagacccccctttgtatcatgtgcaggcaaggccacagcagagtgacctggtctgattcacattcgtgctctgtcttggggcccctaggctggccggcatccagtcaacaacaaggaggtattgagaccctgcctcagtccagccctgctgccagagccagggacacgacagtgggcaagtcaggcatggcccaggcacagccccacgaagcccataggctcccagggctgaccacccaatcagggagggccctgagccacagccccgggaggggtaaaggggcacagaacaggtgcggcaggagggggcttttgcagctgaccgcttgccctctgtttcccctccccaacctgaggttcatgcagccagtattgaacacctgcctgttacatgccaggtactgttctgagcactagggattcaactatgagcaaaaaaagacaaaagccttgtcctcatggagctgacattcaacttgatgggggacaattaaataaaatgaagaaggaaaataatactatttgctaaacgtaatatgtggtgtggaggaaaaaaggaaggagaggagaaaagggaagttgggggtggagtacagtgttttatagagtggccaggggcttcaccaagaaggtaacaatttagcaacaacttgaggtaggcaagggagagagctgctgtgcagatccaccagggaaagtggagcagccagtgcaaagggcctggggcaggctggaccccgccttatcatctctgctgaggaagccactgtggagagacaggtcggggaggtcatggtgtcagcttggagacagtggaaggtgtttggctcttacagtgagtgaagtggggaccccgggagggtcctgagcagaagtgggacaggatgggacttaggatttcacaggaccctgctggctgcgtgaggatagaccgtggaggccaggggccgaggcaaggatctagtaagatggccactgctgtactccagtgagtgatgaccacaggcctggccgaggtggtggccacaggggcagatttagtgtctttgttgaagattaaatcggctttttttggcagtcctgtcatgctggtaactcatttagagctaactgccaagtacatcctgatttgttgtgttgttttggcttttcctcctgaactgctgacacctgggaaaaagccggcatgctggcgtgtgtggcagagcacccggtgtgcaggagccacagggggagtgctactgctggggggctgtcagatcagggccagaaaaggcacctggaaaatccaacccagggttgggaggtggccgggaggctggggcagaactggccccaccctggaagcacaggtgggaattgtggccagtatcattctgggaaatctggccacaaacagggagctgaagaacaggcaccagtcccacccagccctgggaacccaggagaggcactacgcagcaatccggctctaggggaagggcagtcccacccagccctgggaacccaggataggtgcaaggcagcaatccagctctaagggaagggcagtcccacccagccctgggaacccaggagaggtgcagggcagcaatccagctctaggggaagggcggtgtgcccctctggacctgggtcagagaaccctgtcctccccagaactttgtgcagggaggggagctaggaggggttccccactttcccactgggactttcacaacctcacaggcaggctctgcccctctgaatgaatattgaaacggcagctggactgtatgttttttttttgtttgtttgtttgttttgttttattgttgttgtttttttttttgtagagacggagtctcgctctgccgcccagcccaggctggagtgctagagtgcagtagtgcgatctcagctcactgcaacctctgcctcctgagttcaagcaattctcctgcctcagcctcccaagtagctggaactacaggcatatgcggccacgcctggctaattttttttattttagtagagatggggtttcaccatgttgcccaggctggtttcgaactcctgagctcaggcaatctgcctgcctcaggctcccaaagtgctaggattataggtatgagccactgcgcccagcatttttttttttttttttttgagatggagtctcactctgtcgccaggctagagtgcagtggcacgatctaggctcactgcaaccttcacctcccgggttcaagtgattctcttgcctcagcctccagagtagctgggactacaggtgtacaccaccacacccagtgaatttctgtatttttagtagagacggggtttcaccatgttggccaagatggtctcgatctcttgacctcgtgatctgcccacctcggcctcccaaagtgctgggattacacgtgtgagccaccgcacctagccactaatttgtatttgtattttttatttttttggcatgaatctcatttattgaaaacattatatttcacctttctcaaattgaagactgcaaaaaataaaagcagtgctttactgagttctcattaacctcaggagcagcagcgctgcctctccacgctccaggaaaccctggctcccgcgtgccacatctgtcgcacctcactttacaaaacagtcctgaagcttaatcaaataaaactattgtacattagaaaaagagagctgggtgtagaaaagccaggtgtaagttccctttaagcaaaggctgctctgcagttggggcatctttgcttcctccaggaaaaacagcagatgaacccaaaggggaacaggatgatggccaggaggattcccaggaaggtgaagcagtcctccagcaccctatccctgcagacgggacagcctctcatgatggcgatggcattggcagggtaccaagtgatagtccagctgtggtcattgtagaccctggggtggtggttgggtatccctgtgatgaggtaaggggagggcgggcagcagcaagggatgggcagcagggatgacgctgtagccatgcaagctgcatgcatagttgccctggccggcccctaggttgtaggtgggcagccactcccacagcaggggcgtgtggtccatggcagcccggctcaggtcagtcggtcctggcaggggacacagtgggggacgtggcagggatgcagcagactggctggctcaggctcctctgaggcacaatgcctcagcaccgatttttatttttttttatttatttatttatttagagacagagtcttgctttgtcacccaggctgcagtgcagtggcatgatcttggctcactgcatctctgcctcctgggttcaagtgattctgctgcctcagcctcctgagtagctgggactacagggacaccagctaatttttgtatttttattatagagacagtgtttttccatgttggccaggctggtctcaaactcctggtctcaagcaatccaccggccttggcctcccaaagtgctgggattacaggtgtgtgccaccatgcccagccacaggaccaaatttttttttttttttaaacagtctcactctgtcatccaggctggagttcagtggcgtaatctaggctcactgcaacctctgcctcctgggttcaagcgattctcctgcctcagcctccagagtagctgggattacaagcgcgtgtcaccacgcccaactaatttttgtatttttagtagagacagggtttcaccatgttggccaggatggtctccatctctttttttttttttttgagatggagtctcgctctgtcgcccaggctggagttcagtggcgcaatctcggctcactgaaagctccgcctcctgggttcacgccattctcctgcctcagcctcccgagtagctgggactacaggtgcccgccaccacgcccagctaattttttgtgtttttaggagagacagggtttcactgtgttagccaggatggtctccacctcctcacctcctgatctgcctaccttggcctcccaaagtgctgggattacaggcgtgagccaccacgcctggcccacagcaccaattttgaaaacttctttcacttctgtattatttcagttcttttaatgagcatattctttttttttttttttttgagatggagtctcgctctgtcacctggattgcagtggcgcgatcttggctcactgcaacctctgcctccctggttcaagcgattctcctgcctcagcctcccaagtagctgggactacagacgtgcaccaccacgcccagccaattttttgtatctttagcagagacagggtttcaccacattggccaggatggtctcgatctcttgaacttgtgatccgcccgcctcggcctcccaaagtgctgtgattacaggcgtgagccactgcgcccatccttaatgagcatattctaattttataaattttagaaatcattacaaaagcaaatatggaaaaaaggagcatataaacaacagagctgtacgtggcttctgggaaaacctggcagacaagtttggcctctagagtgttacatatacagtacatatttacttatacatatgtgtttttcagaactctcctggctgccagtgacagaaaccaaactctggcttacctagcaaacagaatgaaccagctgtgtagctggcgtgggtggtcctcacaggccacaggggccaggcacttccgtgatatcaggaacctgcctcgttcttgcatggatgacttatctcatcccctacgtatggacatttgggagcttttctgccccttacgtgcctgagggattcctttggacatatatacagtgtggagatagattccatgtagagaaattatagttcaaagggcactgactttaaatatttcaaaaaacattgccaaacagtgctccaaaaaggctgaatgaggcaatcaaccctcctaccaacagagacacatgttttcattctatttatcacactgtggaaggaaggcctctgtctgtgtcctgtgtcctaaggtggaccagcctcctggagagtccctggcctggccccagaaacagcacaagcgagtctcctgcccagccaggtccagctcacttccaccccagcaactttttagctccaccctagtaaacctattaggtctttctgtggctctgggtggcagtaccgatccccgcccacctcatagggacacaatgttcctcgatgctcagccgacatctccagggtgcctgcgtactccagggcagggcagaagagttctaggtcccttttgtgtggttctgcctcactcctcctgtacactagcacaaaactctgaccctaacctgagactgaaatcaccttccattatttcagacatcctccgcatagacaacctctggcagtttgagaacttgaggaagctgcagctggacaataacatcattgagaagatcgagggcctggagaacctcgcacacctggtctggctgggtaaggccctttcctctgtgtgtccaccctaatcgaaggtgacaccctgacaaggttattgccttcccaggagacaataattgtgtgcgacactcagctgctggcccatcattagccagggtacggcagaagctctgcctgctgggagcaagaaagctgctattttttaaaagcctagggcttgtgctgggcaaagtgcagcaaagatgtgctcagacacaagaccacagaatattctgctctcatctgcccaaactttcagtctggatggggtacaaaggggcagctgtggactcctatttaatctagactcaggctgacagataaccatcgacaggtaaccattggctggtgggacccagatgaaaccaggaataatcgtcacagaggctagtgtgtatcaagcacttaactacatgctaagtggggcctatatgctttccatatgggtctttcagttcacacagcatccccgtcatagagatgagcaaactgaggtcaccacaccacatcaggtctcactgccaaggccatggagggttttgatgagatgttccttctgctggcctcttaggagcatcctcacatctggtgaggggcaatgggtccctagcagggagaaggtgatgggcctgagagctccttatgccctgtcttgtttaacccccattttaatcctaagagttgggcatctgttataatcccaatctacagaagaggagctgagactcagggagccccaggcacttgcccaaagctgcacgaccaagaagtatcagagctgggactcacccccacgcctgtctgacctcacagcccacattccctccatcctattaggcggtcttctggtaataagggcaccctggggcatcgtgagccttccaatttgccaaacactcccatcctcctttgtgctgacaattgcaagcccatagcaaacccacaggcagggttatgctgccatttcacacatgcagcaactgaggctcagggaggctgaccagcttgatggagtcatgtgctacaggtagcaggagcaaaccacagccaggtcctctcacacctgggcccaggtctcttgtcccaggtttctcatttctctgcactctagcacccattaatgctgattcatgaatgccatggttttaagcaggagctctctggcctggctgtctctcagacataaagcaagtaccactgagccccatgacagctccctctttctgtctgcttacccagagagaaacctgaatactggtcttggttccctccctaacagaagcttattttcctactacttggagcccctgcacacacacttcctagtcagctcattcccccaaccccttgcagtggccatccacgcttccaagggtcattggactgatggccagtgctccctgggatgggggtgctagagcagtgagggcaggctctgttaagaggtcacactgcccctcagagtataggcagaagctggtctttgtccagccatggcactaggtgcccagggacccaaccacagccagaagagctggatccctggggtgctgaggatgggggttagggaggtggcactcccatggttcagcacgacctcccacactgacatgcacagggctgaggatgtgctggagctggctagccctggctctcaacagctggctatacacatttcttcccaactttgcttccagggatgccacgctggtagcttgaaattggccacggtgggagtatttacaccacagaaatgagcaagcacctcaaatcaggggttttcctcagcccccattggtaaacacttgctagcacaccactagggggtaggctaagcctcccaagaacagaacccagtggcacggtgggaaaggaagtgtgcaggcctggcatttgttagacccccattcaaaccccagcttggccaacatactgactttgcacaagatattccactctgtgaacctcagtttcttttttttgagatggagtctcattctgtcacccaggctggagtgcagtggcacaatctcagctcactataacctctgcctcccaggttcaagtgattctcatgcctcagcctcccaagtagctgggattacaggtatgtgccaccatgggtggctaatttttgtatttttagtagaaacagggttttgccatgttgaccaggctgatctcgaactgctggcctcaagcaatccacccgcctcagcctcgcaaagtgccgggattataggcgtgagccactgcacctggcccgaacctcgattcctttatgtgctgtgctaccttgagcatattaccatgaggcccatttgaatctcagtttcctcatctataaaatggggatgatgctatctgtgctatgaggattaaacaaggtaatgcacttaaagggcctggcatagagaaaggacagagttatcattggtctcaatgtcaacaggtgagcatcccctgatatgcggaggaggctatattaagatgtggttaaactcatctcccaaatcaccttttttttttttttttttttggacacaaagcttcacttcatcacctaggctggagtgcagtggcacaatctcggctcactccacctccaaggttcaagtggttctcgtgcctcagcctcctgagtagctgggattacaggcatgtgccaccatgcccagataatttttgtatttttagtagagacagggttttgccaggttggccaggctggtctggaactcctgacccccaagtgatccccccgcctcggcctcccagagtgctgggattacaggtgtaagccactacgcccagccccaaatcaccttttaaatgtgatcaccctgtggttatcatgctcatatttccaagcccaggaaaaatgctcatttttggcctctaggccattggtgttccaggacaagataacagccccacctgccaggtaaccctgaaaacctgtagtggggaaaaagtacttttaggccggacatggtggctcacacctgtaatccccactttgggaggccgaggtgggaggatcacttgagcccaggagtttgagactagcctgggcaatatggtaagagcctgtctctatacaaacctttttaaaaagttagctggatgtgatggcgtatacctgtggtccagtctactcaggaggctgaagcaggaggatcacttgaacccaggaggtcaaggatgcaatgaaccgtgattgcgccactgcactccagtctgcacaacagagcgagaccctgtctcaaaaaaaaaaaaaaaaaaaaaaaaaggaaggtacttttattcccaaagatgtggaattagtcaaaagtctcggttggggttgagggagcctgagacagctgtgatggagctggaggaacctgacctgccacatgtccagggagaagccttagatgaactctggccccactgtggttagctgtgtggctttgggcaaatcactgagtctctctgagcttctgcttcccaaatgataaaacagcaagagaaattccaaactaccactcagggctgctgtcagaggatatacacgagtgcttgataaactggtaaatgcaaagcacacaggaggtggtcttgctaaaatgccacaggtgtgaggaaaggggacactccaccgctgtctaccccgacccccaagggcactgcttcagacctgcgggttagtattttcctcccagaactatggcagagcatagacaccagtatttgcccacatgtccccagccaggaggatgattggcggaactggagagggtagtgaatattggaggctgcaggaaataattcacacctggcttctaaaaaaatcacaaactattagacagtgagtcaaattctggccctggcagcttggtgctggctcacagggcactcagtagccctgatggttttatttcaggacagcccatcccctgacccaggcagcagaccctcacagccctctcttcttcccagatctgtctttcaacaacattgagaccatcgaggggctggacacactggtgaacctggaggacctgagcttgttcaacaaccggatctccaagatcgactccctggacgccctcgtcaagctgcaggtgttgtcgctgggcaacaaccggattgacaacatgatgaacgtgagtggccgcccagcccgccctcacgcacacctgcagagccttggagcgccgtgggttgagtgggggtctgtggctaggggaagtacaggctgagtgttcagatcttctcattttcctggaaaagccaggaatctggattactccatgagggatttgctcatgtttaaataccatgcttacccaacaaaattcatcggagagcactagtttacaacctccacattagtggcggttctttccctgtgtcttgcacttatttaacaaacatttgctgaggtacatacctgttagtgttgggcgtatgtcctgtgctcactgggaacagagacagacgagatgtggtccctttggagtgaccagcacacacccccatagtcaaggcacaaggagacaagaagccggtgtcctgaggaacaataaaacaaggcctatgggtggtaggagggcaccctgaggcttaggggtgtgcacaagtggcagtggacacagctgggggtgtggcagcagctttaagctgccacagctgtcgtcctgtgtcagaggcgacacatcagatggctcctggcttgcttctgcaacccatcaaccctgggggctgtccagtagcctttgaagattccttttctgcttaggtcagtcaggtggcctgggttcagatcccagctgtgggccgtggtggcttaggtgagtgacctgggagggtcaagcgctgagttgtgactggtatgtaagtctgtccagcaggaccaaatccaggaggcactgtagtctcggaagtttgccctgcatgccagacaggagcatctaaacccaaccaagggtcaagccttctatgcctcagtttcctcacctgtcagatggagatgatggccatgaccctgctgcccaggcttttgcaggaatcaagtgggatcatgaatgtaacgcatttggttcggtgtcaggctggggtgtgttcctaacaaatggaggactgtcatagctgagggccttcctgcgagtgttgggatgaggggagcttgatgcagactcactgagagataactagaatttgccatccagcagaaggaaaaggcttcccaggaggatggaatggtgtgagcaaaggcctggaggtaagttgggaaagcctggccgcacgcatcgttgaggagcgcagggtccctggacgaggtcaaaggtgtgtggtgcagggttgggctcaggatgtggccgggcctcgccacagtcagtcaggatggccagagaagcagtgggagccgaggaggcttctgtctgagatgtatttggggcaggtctacatttaggaaggaattcacccccatgagggtggatttgagggggattgtgagaatgggttaccccaggacagtgtgaccaaaaaggatactgtacctgcaggtaagagaagctggccccaaactggctggaagcagaggtaaggcagggacttgcacgcaggtggctggtttgagaggtggcttcaggaagctggagtaagggaggcagggaagaaccaacacacaggcgtgtcactgagactgctgctgcaggtgacgagggaggattccccggcctcggaagtgtccagaatgcctcccagaagtgaccctctaaggacaggagcctaaggcatttgattcccgcaacagctgagggagaccccagggggattaactttcttgccacctggcttttgggctgggtgggcttctttggcttcagagatatctctgaggcagaaagtgagtaatgagataggacgctgccagctaaggtctctcatggctacagctgaagccggaggtaagctgagcccctgcggcaaacaacaagggcatttagtggcgtgataattggcactgcaaggaaggggtgcttatcagcagagcttcaaggacgtgagttccttctgcctctgggctctgccatcctcagcatctccccagagcttgattctcttaatggttgcagtcaaggacacgggcttccttgtctgcatctagcaggatggagagagcaagaactctccttccgacagtggccctttagtctgatcaagccccctcagggtctacactgaccctcagcctaacatcatggctgggtgacggccaggctgggcttacatgaacagcctggggtgggaagcaccgagttgtcactagcagttccgttgggtcaagccacagaggtggtggagtctcagaagtttgccctgcatgccagacaggcagcatccaaacccatgcatggtcttgcatgaatcagcccctgaccttgtctctactcccatctcaacttcttcccagccctctccccgcattctgcagccaccctggcctttgctcagtgcctggcatgtgccaagttctttgctgcctggggcccttgcctgtgctgtcttggcttccaggaatgtgctctcctctgctcttctgcggctggctccctcaggtctcagattaaatgtcacctccccagagagacctctgaatctcctaactgaaagaggcctccctgttattttctctcagggtgccatcttgatgttccttacagcacttaactcaaagcataatggttttatttactttttaaaacatttggccgggcccggtggttcacacctgtaatcccagcactttgggaggccaaggtgggcgactcacttgaggtcaggaattcgagataagcttggccaacatggcgaaacccgtctctactaaaaatataaaaatgagccgggtgtggtggcgggtgcctgtaatcccagctactccagaggctgagacagaagaatcgcttgaacctgggaggtggaggttgcagtgagccgagatcgcgccactgcacttcagcctgggtgacaagagcaaaactccatctaaaaaaaataataataaattaaaaagaaaacatttttcccccactcctaaaatatgtgctcttgccataagggcagggaccccacaggccttgttccccactgtatcttcataatttagcacatgccggaggcctgctaggtgactaatagtgtttgctgctaggtgactaatagtgtttgctgctaggtgactaataaatgactgaaagaaattcactcagaaaagcatgctagatttttttttctatcttttgcatagtacagtgtctagatgctatccaatgaagtattgcttttttttttttttttttttttttgagaaggagtctcgccctgtcacccaggctgtagtgcagtggtgcaatctcggctcactgcaacctccgcctcttgggttcaagcgattctcctgcctcagcctcccaagtagctgggactataggcgcctgccaccatgcccggctaattttttttttttgtatttttagtagagacggggtttcaccatgttagccaggatggtctccatctcctgacctcaagatccacctgcctcagcctcccatagtgttgggattacaggcgtgagccttgtacccggccaaagtattgcttttttaaaatacttttttgccagtacttttaatggcaaaaaccacagttacttttgcaccaatctaatattaactacctggttaacattttcctcattttactaaaaatagagtgtagggagaataaataaagttactggaatgttcccctagctgttatccagggaatccaaggttagccataagttgggtcccatttaatttaagatatttgtaccttccatggggctttacaatctacaaaggcatgcctggccaggtgcagtggctcacgcctgtaatcccagcactttgggaggctgaggtgggaggatttattgtgaccaggagctcgagaccagcctggtcaacacagcaagaccccatccctacttaaaaacaaaatagggccgggcgcggtggctcacgcctgtaattccaaccctttgggaggccaaggctggtggatcgcttgagcctaggagtttgagaccagcctgggcaacatggcaaaatcccatctctactacaaacacaaaaattagccaggtgtggtggtgcaggcctgtaatcccagctactcgggaggctgaggcacgagaatcacttgaacccgggaggcagaggttgcagtgagccaagatcgcacctctgcactccagcctgggcaacagagcaagactccatctcaaaaaataaaattaagttaaatttaaaagatttttaaaaaataaatagaagggtatgcctatgctggtaacagcaactaaaacgcccattaccgaataggtgtcaggcactcttccagtgctttttatagcttatttcacttggtctttataacacctgtaacacacatgatatccttatacccgtttaacagatgtggacgttgaagctcacagatgttgggtaacttgttcaaggtctcaccacatggttcagcagacctgaaccatggtctgctggttctttgaaaagcccatttctgacagaaggtctcggtactgcttcccagcctggaacacccccacgcctgcacactgcctgtcaccccaccccagtgctgatggtgctgtggccaggctgactctgaaagagtactgaggagggaggtgcagctgtgttttcaactctgtggcagccaagaaaatgggcctttctccctttttctccccagatcatctacctccggcggttcaagtgcctgcggacgctcagcctctctaggaaccctatctctgaggcagaggattacaagatgttcatctgtgcctaccttcctgacctcatgtacctggactaccggcgcattgatgaccacacagcaagtgtctccctctcagtctcccagccctgtgagacagattcctcaagcccccaggtttcttggaaaaggggcattgaagagtagcttcccctgcccacaactaggagagaaagggcagctccctcttcctaatccctttacctgactctgtcagagtgattccagcagcacccttgtaagtactgttttgtgtgcgttcccaggggccaggcctcttccacacactgtcccagggccacctcacagccatcctgcactgtctagttttccagatgaagaagctgaggagggctgggagcagtggctcacgcctgtaatcccagcactttgagaggctgaggcgggaggatcgcttgagccaaggagttcaagaccagcctgggcaacatagggagaccccatctctacagaaactaccaaaattagccaggtgtggtggcacacaccagtaatcctggctactcacaaggccgaggtagaagaatcgcttgagactaggagtttgaggctgcagtgaactaagaagatgccattgcactccagcctgggcaacagagtgaaaaaattaaaaaattagaaaagaaaagaagttgaggaggcccaaggagggcaagcagccaggatcactggctcaaggccaagccaggattcaccctaagttggtgtcatcccaggagcaatattaacagctgagctccagagggaaccaggccatcagaggctcaggcctggctctcaggggcagagtcagggctggaggtagagacctgagtgtcatctgaggattgccaattggcagtagttgaagccatggtacaggtgggatcacctggggcacatggagtgagctgggggacggggactaagttctagaggtgccagcattcctggccaggtacagggggatgagccagtgcggtggagagagccaagggccagaccctcgtgaccagccctatggcctcactctacctctgtcctgttgtcctccttccctaaaagagggccagaaggcctgctgagggctgttgggagtgagagagcaagtcctctgtggagaacacccagtctggggcgaggggagcgctccattgctgtggctcctgccctggagatggccccgggaaccccagcctgccacgctgccttccgctcctcctggtctttccctgatttccctgcgctcacaaaaacctggtgagggtcatcaggagatgggcattctcatccacgagacctcatggctttcacagccttcatgcaggcccctgtgcaacacccctgcccatgcgcgggaggctgcagcatggcagaggcggcatggcagaggcggtgtggctcggaggaacctctggtaacaatgccactcccgttccctggtcagaaaaagcttgcggaggctaagcaccagtacagcatcgacgagctgaagcaccaggagaacctgatgcaggcccagctggaggacgagcaggcgcagcgggaggagctagagaagcacaaggtaccgttccggcaggctgcacgccctcggccccctcagatgcccacaagagggcactgatcaagtaaaacggtcctcagggatccccaggctctgaaaacacagaaatcatgctccctccacagggcctgatgccctctcccttcctggctcatctgctgtctgccccagggccagctccgtctcagtccagaccctgaccctactccttactggcattcctgcctccagctgctggagagaatgtgctaaaaacagtctgtcagaggccccttaagacccttaaggcagttccccatgacatgccaggaacggctcaggtcctgtagccatggccctgaattcatgactggacccagttggcctctttcccaccagtctccacccctccttgcaaccagactgagaaatgtataacattctggaaacagcctgcagttttatgcctctgcacctctgcacatgccattctctttgtctggaacatgctccctcctgacctgccttcctcatgggcctgtgagatgatgcaggggcccctgacaggagccgtcctacctacgtgtgtttctgcctgcagactgcgtttgtggaacacctgaatggctccttcctgtttgacagcatgtacgctgaggactcagagggcaacaatctgtcctacctgcctggtgtcggtgagctccttgagacatatccttctgagttcatggctgtctcagagcctctgccaccagcctgccttggcaaggccccttccgctctaggcctcagtttcttcatctctcttgtaagaccttgggaggtaaaatctccacttgagagcaatgtacccaacaggcagttcagagtccggtcagctgagctgcatgggggagatgctgtctggatttcagggacatgtgtagtatctggtcagcatggcatgggctggccatgtttggcaagccaggttttcagaggtggagaaatggattgaaatgtgttctcattagccatactcacttgttcttgttgtgcacttggatctggcatttattgttttctcaaccaccccactaggcaggtaccatcattaaccccattttatagttggggaaacatagcttggctgtccagggtcaccccattagaggccagcttttgaagctttgtctgtggggcctgagaatctcattctttccccagttgcctggagcccagaggacgtggttggtacctgtcattagggctgaggctgtgaccatcgatcaatgggcttaagttgtgagctgagggactcaggacagaatcaaggagctcctggatctgagagctctgagctaaggcatccagtcacaggtgagtctgtggagccaccttcactggatagagaaaaattcactcaaaaacctgacattctgggcctgtgaggtggctcatgcctataatcccagcactttgggaggccaaggcaggaggattgcttgaggccaggaatttgagaccagtctaggctaggcaatgtagtgagaccctatctgtattagtctgttttcacgctcctgataaagatatacttgagactgggcaatttacaaaagaaagaggtttttggtttttttgtttttttgttttttgagacagcgttgcgctgttgttgcccaggctggagtgcaattgcgcaatctcagctcactgcaacctccgcctcctgggttcaagcgattttcctgcctcagcctcccaagtagttgggattacaggcatgcgccaccacacctggctaattttttgtatttagtagagactgggtttcactatgttggtcaggctggtctcaaactcctgacctcaggtgatctgcctcggccttccaaagtgttgggattacaggcgtgagccaccgtgcccagccagaaagaggtttaattgaacttacagttctacatggctggggaggcctcacaatcatggcagaaggcaaggaggagcaagtcacatcttacatgggcagtgggcaaagaaagaaagcctgtgcagggaaactcccatatttaaaaccatcagatctcatgagactcattcactatcatgagaacagcacaggaaagactcacccccataattcaattaccccccaccgggttcctcccacaacacatgggaattatgggagttacaattcaagatgagtttgggtggagacacagccaaaccatatcaccatctctaaaaaaaaccaaacacacctgacattctggaaagaatgagggcagggtggtgaggaatagtgaagagcagggctccagagctgggttgtttctgccagctggtgacccaggtttgccttggctgtagccctgtgtagccgtgtgactttgggcaaggcatttcatctctctgggcatcagtttccatcccacaggatcaccaaggtcctgtaggctttacctggttgactccaaggactccgtgtcgcaggcccttttgtaccctcagctgcagatgaggaaactgaggcccagagaggtgaagtgacttgccagggtgggtcctggaagcagtggcagagccaggacttgaacatccccagcacagctacagcagctgagcaccaagacaggccctcagtaagggtgcccttccagatagcacaccagagacagaaacgcacactgcctgcttccccagctgggaccggctcgcaggcccccagggtccccaggcctctcttctggggcctctctgagcatgtctgccttctgctctgtagactccgcaatggtttctgcctccttccttcacacaggccccattcctgaatccctcaggctgagggtggggatgcaccaaacacacattttacctacatctcaatcctggctctctgggcctttgatttcttcatccaccaaatgaaccaaatgagaccaggagtttgagtctcacacactgttgagcgcacagtctgtgcactgtgccagggttaccaacaccttggccgtgccctccgcagcctgctcctgaaacagctgtgggcttccttaacagccactcacctacaaggacaagtttgtcatcatctgcgtgaatatttttgagtatggcctgaaacagcaggagaagcggaaaacagagcttgacaccttcagtgaatgtgtccgtgaggccatccaggaaaaccaggagcagggcaaacgcaagattgccaaattcgaggagaagcacttgtcggtaggccccgagcctcctgaggccctccctgtctcctgctgtaggccctccctgctcttgccactcccactgtagggggactgcaactcctgtaccctctgatgacccctgaggccaatggttattgtccccatttgccagagatcatacagctaatcagtggcagagccaaggcccgccttacaccagcaccaccaaccacagctccccactgcttgacgtgtggcctgtgggtctttgtcacacaaagtgcccttgggattcaaggtcggccctaccccccaacttatcatcatcgttactattaataacagtattagtatgaccattactattttgacagtaatgattaccatccttttattcattcattcatttaatagacattttctgagctctactctctgcctgatcctaagaagctagagccacactggacatggttcctgcccttgtggggctcagacccaggcccaggccccacccctcacctgagcaagcagagggatcagtgccatcctggagggaagcctggggagccttgggggtgccctaggggcgccttatctcaggctggggagtttagggaaggctgaggctcacagaagaaagaaaagttgatggggaggaagggcgttcctccacccactaggagcagcaaaggagaagactctgggtggtcaggactcagcctaaccaggccatggggtccagcccaagcaggggccattgggaagggcaccaatctttgtatttgatggcaactgcctctttgagttggcattacttttaaagacaggatgcttagcctgttgtaaatcacagatctttgtgagatgctaaggaaagctgtggaccttctttttcctcaaaaaactgttcacacacaccaagcttgcttgtagcataaggggctttagggagcccatccttgttgtgaacttaaggcccttccttgttgtgaacttaaagtagagcaaagtccctcgatgcgcaacttcagatctgatggagttggtgatccactcccatgtgcttcccgcctccccaacggccacccccattcctgtctcattaacctccagggcctcacatgttgtgcgatttaattctcaagaccctccttgttatattttagggagcaggggttactgcattcaaccagaagttcaaaactgtcagcagaggaatacatttggctcacatatgtgttttatgtggcctgaatagggttttaaaacatttcgaacatcctgctgacattagaaactagcagatttcacagaaaaaattgtggttgccagcttctctggaagcaactgtcatcagggcttgagtggcagttgtcccctctggacaggtcatgtctccagtcccgcagtccctgtccagccttccttcctgatatttatctggtccctgtagccactgggcttgggagtgtcagctagctggctcttcctgaggcctggtgcagggacccagcccctcagcagcgagtccctctgcagaagcaggatatgggccatgccaagcctgacttggaacatggaacgtgccacttgctcctccgttcaggcacctgccttcattgcgggccagctcctcaaaggccacctcggacgagctgaccatcctagtgctccccttctagagccaagagcagtggatcctgctcagcctgcatgcggagtccctgggccctggaaatgtgctcacattcaggcccagcagcaccctgtggcctggcacagggattttccattgttccctgggtgctttccatgcacagcctggatagaggccactgacttggaagttcccaagaccccataggccctgcagacctccagttccctccctgacaggccctctcctataggttttcctacgctcctcccactcatccccattaggcctcatccattgcacacagtgcactgctccaggtgcccagtgagtcacgtttcagggtcatgctgcagccatgtaaggcttggggctcaggcagactcctcactggtgacccagagacacattattgaccctctcctagcctccatttcctcatttgcagaacagagataaccaccttgaagaactgtagtgagaaacagagagggaaagcacttgtgcaaggcctggagcagagtcagcccaaaaggatgacagcatgtctgtgtgtagtcagctgcactctcgaatgagtagtgtgtgcacatggcacagcctgaagaatggccactgggggatacggtctccctcctactcctgtatctctgtgtgtgtgtgtgtgcgtgcgtgcacacgcgcacatagcatgccctattctgtactttgctttcgtgtgtgtgtgtgagcatagcatgccctgttctgtactttgctttcctatgtgtgtgtgcgtgtatgcatagcatgccctgttttgtactttgctttcgtgtgtgtgtgtgtgtgtgtgtgtgtgtgagcatagcatgccttgttctgtactttgctttcctatgtgtgtgtacatgtatgcatagcatgccctgttctgtactttgctttcctctgtgtgtgtgtgtgtgtgcatagcatgccgttctgtactttgctttcacgtgagtgtgtgtgtgtgtgtgtgtgcatagcatgccttgctctgtactttgctttcgtgtgtgtgtgtgtgtgcgcgcatagcatgccctgttctgtactttgctttcacgtgagtgtgtgtgtgtgtgtgtgtgtgtgcatagcatgccttgttctgtactttgctttcctatattatgcatcttggagagccttccaaaatgaaaaagtagcttcttttttttatagctaaaatatcgcattgcatgggtgagccataattatttagccagtccctgttgatggacagttaggttttttcccaaccttttgctcttttagtgttccactgaataagttggtgcaagtttgacctgcaggatgaagtcctagaagtggaactgtgcattggtttttttcatggttattgtccaactgtaacctacagaacctgtaccttccacagccgtcatcaggccagtgtcacaggcttcctcatgtttgccaatctgtgcaccctgagtatgcatttattttctcttaagtggggatgagcaacacgttttacatgttttacaaccatttgtgttttttattctgtgaattatttgtacttatattttgcccttgcccacttttctatttggtttttggtttctctctctcttcttaaattatttattattattattttcagaatagggtctaactccattgcccaggttggagtgcagtgcaccattatagctcactgcagccttgaactcctgggctcaagcaatcctcgtgcctcagcctcctgagtagctgggactacaggaacacaacaccacacctggctgtttctttctttttttctttttctttcttttttttttttagctagtcaaatttagcagtgggagactgtataccaacttcagtgacaccaaatttaataagttctcataacctactaccatcagaccagacctttcttttttaaaaagttattacctggctgggcgtggtagctcacgtctgtaatctcagcactttcggaggccaaggtgggtggatcacctgaggtcaggagttcgagagcagcctggacaacatggtgaaaccccgtctctactaaaaatacaaaagttagccagggtggtgatgcatgcctgtaatcccagctacttgggaggctgaggcaggagaatcacttgaacccaggaggtggaggttgcagtgggccaagatcatgccactgcattccagcctgggcaatagagtgagagtctgtctcaaaaaaagaaaaaaaatgttattactttgtaggagctctttgtagattgtgtcagtgaaatgaatggcaaatatttttcccggtttgtgttttatcttgcaatgttgtctgtggtgcttttgccattcagaatgaaaaatttttttggctgggggaggtggttcacaactgtaatcccagcacttcgggaagctgtggcaggaagatcgcttgagcccagcagtttgagagcagcctgggcaacatagtaagaccccatcttaaaagtaaatacataaataaatttaaaagaattaaaaaatttttaaggtagtagagtttaccaatcttctggttatatttggcaagatctcagattatttgttaaaaatctcccaggtttggccggacgcagtggcttatgcatgtaatcccagcactttgggagaccaaggcgggcgggtcacctgagggccgggagtttgagaccagccttgccaacatggtgaaaccccatctctactaaaaatgcaaaaattcactgggcatggtggcaggcacctataatcccagctacttgggaagctgaggcgagagaatcgctggaaactgggagacagaggttgcagtgaaccaagatcacgtcactgcactccagcctgggtgacagtgtgagactctgtctcaaagaaaaaaaaaatctcccaggttttctgctagcacttttatggtttaattttttacatttgaatcttcatcaggaatttgttttcatgtaaggcttgaggtagggatcgagcctggtttttctccagacagggtagctattattatgtcattcgcccccttcaatcatgctgttactccatcctccttcatgactaataccaggcatcaacaaaaacaagccaaaatcacatctggtgttggtggtaacccaggccctttgctagtaagcagctggtagtcagtgctgtttggaccccaggttgccatataccctctgagcaccccctcattccaaagggctcagcatctatttagcagtagcttccacttgctcactggggttctgtgtgggttcaattcatctcctcaaagactggaactgtctttccttgccagggtctttcctggcctgtgcctgtgataggccttttataggagactccggtagccgagctccactgtgcaccaggtgcttcctgtacacggcctctgatccccaggaccccgtgaggcagagatgcttctccccatttacagtgaggaaactgagtcagcgaatgaaagtgggtctctcaaggtcacactgttaagtgacccaggcaggattcaaattcaggttcacctaactctgaagttgtaaggcaggtaaattttttcctctagcttatcagggtcactgactgggaccaagaattaaactgacataagacaaacgagaaaagcatacaaattttattgagtaatttgtacatgtacatgggagcattcacaagcaaaatgaaggctcaagaagccgttagggccgaaagcttatatacttagttggacagagagtagtgaattgtgagaacgtgacaagacaaagaggtttgggctaaggcagttcatcgtggagaagtgacaaggcagatgagcgttagtttaacaaggtttgttcacacagattccccttggcccggactccctccctctgatgataagaatggcttcttggctgggcacagtggctcacacctgtaatctcagcactctgggaggccgaggtgggtggatcatgaggtcaggagttcaagaccagcctggccaagatggtgaaaccccgtctctactaaaaatacaaaaaaaattagccggtcataatggcaggtgcctgtaatcctagctactcaggagactgaggcagagaattgcttgaactcaggaggcagaggttgcagtgaccgagatcgtaccactgcactccagcctgggtgacagagtgagactacgtctttaaaaaaaaaaaaaaaaaaaaaaaaaaaaaaaagaatggtttctttcctcctggtacagggagggcacctttcccatgggagatttaacttctgctttcaggaagaaaaagggaggtcagggtgtcctctttgcattttctgtttttaagtatctttttttttttttttttttttttgagacagagtctcactctgtcgcccaggctggagtgcagtggcacaatctcggctcactgcaagccccacctcccaggttcacgccattctcctgcctcagcctcccaagtagctgggactacaggcacccgccaccatgcctggctaatttttttttttttttgtatttttagtatagatggggtttcactgtgatagccaggatggtctcaatctcctgacctcatgatccacccacctcggcctcccaaagtgctgggattacaggcataagccactgctcccggcctttaagtatctttaactcaaaataatcactatgccaaagcggcatattttggtgtgaaatgctctgaaccccatgaaagccatggctccttctaccctgcctaccagcctctaataaaaacctgagcttacagggagtgagcacttgctagtgctcaaagagcctcacatgtgttctctcacttgtgtcaagggtaggggctatcaatcgcactttacagaccaggaaactgaggcatggagagggtaggtagcttctacacgctttcagagccagcaaatggcaaagctgagacttgcacttgggcaggctgactcgagtccaaattcttacccacaaaaccaaattgccacctgccattatctaattacacttagttgttgattcctaaagtgcagtctattgtttctagagtttaagtgccattcgagaggagttggaactgcccaacattgagaagatgatcctagaatgcagtgctgacatcagtgagttgttcgatgcgctcatgacgctggagatgcagctggtggagcagctggaggtaaggctgggccctgggcacaagtgccagaatctggcgatgcagctgcacatccataggtgaactgtagccttcatgggcacgcctctgctggaaacgtccagcacgactcagcgtggcaggctgtagctttcttgctcatcagtcctgtttgcttttattacattttaatcatttacattggaagtgattcttgtggaaaatgagaggtgagctcattcttctgaaatggtccccctatcctggaagtcagtggggagaggtttttgattagacccctggagctatccgggtactctaaaggcaaagcgcacccccacttggggaccaaacaaagacccctccgcattgcagcctgcagttgccgcttctcaggtgacgtgaggaggctgcaactcagcactaagtagtgaaaatgaaaagcgccgctgtctgaaattcattagcagccagagtatgtgttacaaggcagcggaggctgggagtctgaagtggtgtgatgaattgaacctcatcggatgctgctgtggctgggccaagtgatagcacctaatcaattcctcacacgtcaagtgacacctcagacatgggatagatttccccatcacatcacagggcaggtgctccctccctgctggagagcacaggcactgcagaagcagcgcacagtgccaggggcgagtgaggcagcagctcccagccttttcaggcacggagattgcctttcaacatccaaacatttcccagaacccatgtgccatcctacttgtattactggtggccagaaagccacaagcgcaatcatgcttttcaatgaccctatttttattcacgagaacagcacatacatgtgtttgaaaattatgtgaggtgctcactctgcagacagtactcacattcctatagattccacccctgcccaccttgcagcccctggagtctatagcagatgggagtggggcactccgagagtggcaggcctggagatcacatcttccattgttccttcaatcaacactaactcccatttgggccttaggtgccttgctaagcaccacaaaacagcaactaactgaaagagatctggagtgccagcccgctcctactgagggcctcctctctgtcaggcaccttgcaaagcattttgtgtgaagtgactcatttaacctcaccacaacgccacaacgcagggattatgcaggtaacctatttcccagatgaggaagataaggcccaaggaggtgaaatgcctttcccagagttacacagagtgctggagctgggaatactgacccaggcagtctagctcttaacagctcactccactgtttccctggaggtgatgcacagatgtcactgggaaacccaaaggagagggggttggctgtgtgtgtgtgtgttgggcaggcaggtaaggggagtaagaccaggacaagtgttcctggcaaagttccggtgacagcattaaacattcagatggtgagggagttaatatggttggagaacaacaactttagagagagcagaggggtcagttcacaaccatctgctcaggagggtcaagatgggtggtctttatgctgaaggtctgtgattagaggagctggttgctaaattttgaggagtaccttttgctctgtgctggacatctaaatatgcatgttaactgtgttctttaacatttccaggagactataaacatgtttgaaaggaacattgttgacatggtaggactgtttatcgaaaatgtccaaagcctatatcctttctgtgatgaccttccccatggggaggtgctacagagcccctgggcttgtcccggcctctggacaaaagaatgttccacagggtctgaggaggtttcccgaccctcagaacaatgatggcctggttagagctgtggtttggatgcccagagggacaacatccaaactgtttgcagtaggctcccagcatgattgttctcatatgagtgatgttcactaggaaatgacgccccctgtgttgcaggcaagcacactctggggttgaggcaacccccacgtggaagacactataaggagtacatcaggtgaaatgttagggtgaggagccaacatcggagcatggccaacccttcttccacccgaactcagggcactccacatggggcaaactgctgtgctccagctagcagcagccctgtggtcctgccctcctggggctcacagtccctcagggagacaagttgtagaggcaacaagtggtgccaaatgcacagggtgagaagcagttaacccagaggccaggagcctccatgcaggagggagagaagagtgtgatggcaggggccgagggtccgtccgaggtgtggggcaggggcagggagtcgaggaaggcccagggttcggagcttgtgagtggacggtgctgccagccagaatttccgagctcgccttgggcccttaaagtctgtctcccgccgtctgagagcatcagggacgcgccgggcctgctcctcccgggcctttgcttaactcggggctgcacgatggctcagtgccgggacctggagaatcaccaccacgagaagctcctggagatctctatcagcaccctggagaagattgtcgagggcgacctggacgaggacctgcctaacgacctgcgcgcggtaggcggggcgggctgctcggagcctgacagatgtggtccagcccagctctgtggctggactgaggctctgtgagtaagcctgacaacctcccagagcctcagtgttctcatctgcaaaagggcacactaacctgctttacagggttgctggcagataaaataggctaacaaagcacctggtggggcacccagtggggcccagttaaagaggagctcatgataattagatggtttcaactttccaacagggtcgtttccaaaagttcaattatgtggaggcttctggcactttctaagagaagcagttacaggtagaggttgaagtctgagatttcccctggaggtcttcttaaccttagagtctgtataatgagtactgtgggggtgttggaaccaccatttctgatcctgcacaatgccatccggtttgcaccagcacatccactgatgaatggtcacaaaatcagcagggtcggcctgaggaacctggctccatccctggggtctgcacgctaagaaggctctcccggatgtctgcgctgggtcccgcggcagcatgtctatgtctctggaaggagtgtgggcatcaagggcccagacagagatactatgttgtcagggcccagacagagatactatgttgtcagggcctgctttagtgcatgcatcattcactccactgccagtttctcagcttctctctgtcgcgacatcaccaccaaggcaagccaccatcgtccttggcctggactgcttgcctctttactgtcctcttacagtccgtcctccatgtggcagccagagggacccttgaaaacccaaaccctatcactgcacacttttacacaacaccttctagtggctttcatgacccctagcgtcagctcctccccatagtcccccagaccctcgggctgaccctgcccatctgggcgattcccacccccagaaccctcactcctgatgctcagcggcagcctctgagctcttccccagtcacccaggcttgctcctttcagttgatattccacctggcagacacgctcttcctaggtccccatgtgcctggcttgtccttgtcattcagatttcagcttgactatcagctcttgggagaggcctttcttcatcaacttccagaaaaaccactgtctctgtatcacatgccccatttatcaggtcaggtcagagcctcatcatagtttcaaactacctggctgatgtgtatttgctgctgatgtgactattcacactacatgtaagctcaggagggaggacggggatggccttttcaccaccatgtaccccctcagtaccagcaacagtgtacaacatgcagcacagatgccaggcatcatctgcagaatgagtgtgagagcgtatgctcaccaagcctccactctgccagatatggggctaagtcttgcagacacacaggaccagcagtccctgacttccacagcctctgtcctggggcccagacagacacccaacatagcagtgtggtgatagggtcaccgtgacaccagccttccctccctaagctgataactgcagctaattgctattgaccagacacaggaaaacaccaccttccctgtgaagtaaggctgtccctgagtgcccagtttggaattccccagacagaccatcttggggtgggtggagatccctcccagcacagctcccatgtctgtgacacccagaaggcacaggactgaaacgtgcccaatttctaatgactaggacacacagaaaaagatgaatccagaggccaacagcagagaagcaggctgggctggcattttcagtggccagccctccctccagcccagctggctctgcctggtgccagctgaccaccattcctgtggctttacgcctgcagttataggaagagactccccaggaccttataccatggcctaagtctccttccatctaagcaacaaaaaatgtgacctacccttctcaggaggaaaaagtatgctctgactatatgagtaataccaacatcactttgaaaggctgaggtggaaggattgcttcagccctggaatttgagaccagcctgggtaacatagcgagaccccctctctacaaataataatttaaaaattaggtgatgcgcacctggtggtcccagctacttgggagactgaggttggaggattacttgagcctgggaagtcaaggtgagccatgactgtgccactgcactccagtctgggtgacagagcaagaccctgtctcaaaaaaataaaataaaataaaggaataatacatcgctgacatttgactgggggcctcctgagggccagccctctgggaagcactgaactcatgtttgcttttttaatcttcacatcaacacggaaaagtaggtactattatggttcccttttacagatgaggaaactgaggcacagagatgaaggtaacctgcccaaggacacacagcttataacagatagggttgtgatttgaaccaggcagtttgattgaaagcctttgacaaaatgtctactgtatagcaagatggggatgttcagaggagggactagggctgtgggtgaaaaaaacctggcttctgttacctaattatcaaggagcatatcttgataagtcaccctgatgaggttatctctaaaactccactcatgcagttgagtgactgttatcagctcatgacctacatggggccaatctgtcccatatctattttcaagtccttccagctttgagaggaaaagcagaacgtacatgctgaggagagagcctggagctggcactgagggagggcatctgagtggtgctggcagccacagctgcccatttagggaggtggggaggacagaggtgctgcctggctgctctgaacatccacgcgggtatccggctgcgagggcagggtgagtgctcaggcccagggaggatgcaagtccccagggtctgctcaagtggcagtgggtctgacccaagccagcagtctctggacagggagactgccacaagattctggctggcaccaggagactccgcgttggcttgtccctgcccatcaagccaagctgctcatttgtctgtggcagaggagaatgcagggttgtcaggtgccctttgtgggtatgatggaatgatctgatcccacatgccatggggcagcaagtcctcaagccactagcagtgcggtggtcctggggaggggcaccagctgttgccttctcaaaagtcactttgttgctacccaaagcaacctacagattcaatgcaatccccatcaaaacaccaatgacattcttcgcagaaatagaaaaaaaatcctacaatttagaatcacaaaagaccttgaagagccaaagccatcctgagcaaaaagaacaacgctggaggcatcacattaccagacttcaaaatatactacaaagttgtagtaaccaaaacagcatggtactggcataaaacagacacacatttctccaagaaaacaccaaatggtagatgacactatggcagcaggagggcccagaagcctggaatgggaaaccatggaagctttgtcagcagcttctggggctaggattgtggccatagtcagggcaggggctgaggctgcggggagctctcagaggcaaggtccaggcaaaggagtggatgcccatcaccaagctgggctgcctggtcaaggacatgaagatcaagtccctggaagagatctatctcttctccccgcccatcaagtagtctgagatcattgactttttcctgggggcctctctcaaggatgaggttttttttttgtttgtttgtttgtttgtttgtttttgagacggaattttgcttttttgcccaggctggagtgcaatggcatgatcttggctcacgacaatctccacctcccaggttcaagtgattctcctgcctcagcctcccgagtagctgggattacaggcatgcgccaccatgcccagctaattttgtatttttagtagagatggggtttctccatgttggtcaggctggtctcaaactcctgacctcaggtaatctgcccgcctcagcctcccaaagtgctgggattacaggcgtgagccgccacgccaggcctaggatgaggttttaaagattatgccagtgcagaagcagacctgccccagccagcgcagcaggttcaaggcgtttgttgccatcagggattacaatggccgtgtcactctgggtgttaagtgctccaaggaagcagccactgctgtcagagggatcactgtcctgaccaagctctctactgtccccgtgcagaggccactgggggaccaagattgcaagccccacactgtcccttgcaagatgacaggctgctgcggctctgtgctgctgcaccttattcctgcacccaggggcactggcatcctcttggcctctgtgcccaagaagatgctgctgatgtccagtattgacaactgctacacctcagccaggagctgcagtgccaccctgggcaactttgccaaggccacctttgatgccatctccaagacctatagctacctgccccctgacctctgggaggagactgtgttcaccaagtcttcctctcagtaattcactgaccatcttgtcaagacccacaccagagtctctgtgtggaggactcaggcttcagctgtggctacaacacagggttttgttttgagatggagccttgctctatcgcccaggctggagtgcagtggtgcagtcctggctcactgcaacctccaccacctgggttcacatgatcctcctacctcagcctcccgagtacctgggactacaagcgcacaccaccatgcctggttaattttttgtatttttagtagagatggggttttaccaatgttggccggccaggctggtctcaaactcctgacctcaagtgatccgcccaccttggcttcccaaagtaacacagggtttttatataagaaaaataaagtgaattaagcctgtttaaaacaaacaaaaacacagatacataaaccaatgaaacagaatagagaactcagaaattaatctatatatttacagccaactgatttttgacaaaagcgccaagaacactcactggggaaaagacagtctcttcaatagattttgctgggaaaactggatatccatatgcagaagaatgaaactagattcccatctctcactctatacaaaaatcaactaaaaatggatctaagacctacatgtaagacctgaaactggcagggcgcagtggctcatgcctgtaatcccagcactttgggagcctgagacagacaggtcgctggagctcatgagttggagaccagcctgggcaacatggcaaagacccacctctctataaaaaatacaaaaattagctgggcatggtggtacctgcctatagtcccagctactcaggatgctgaggtgggaggatggcttgagcccaggaggtggaggttgtagtgagctgaaattgcaccactgcactccagcctgagcaatagagccagactttgtctcagaagaaaaaaaaaaagacctgaaactataaaatgaccagaagaaaacaagagaaatgctttaggacattggcctgggaaaaaattttatgaataagacctcaaaagcacagacaacaaaagcaaaaataaatggaatatatcaaactataaatcttctgcacagcaaatgaaacaacagagtgaaaagacaccctacacaatgtgacaaaatatttgcaaactacttatctgacagggtattaatatccagaatatacaatgaactctaacatctcaatagcaaaaaaacaaacaattcaattaaaaacatctgaacagatgtttctcaaaagaagacatacaaatggccaacaaatacattaaaaacttttcagcatcactagttatcagggaaatgcaaataagaaccagaatgaggcatcatctcaccccacttaggatgataattatcaaaaagacaaaaaataacaaatgctggtgaggatgcaaagaaaaaggaactcatatactgtaagtaagaatgtaaactaggacagccactaggaagaacattgtggagggccctcaaaaactacaaacagaactatcatatgatccagcaatctcactactgagcatttgtctaaaggaaaggaaatcactatattgaaaacatatctgcacccatgtttactgcagcactgttcgcaataacaagatacagaatcaacctaggtgtccaacaacagatgactggataaagaaaatgtggtacctatacacaatggaatactattcagccataaaaaaagaatgaaatccatggcaacatggatggaactggaggacattatgttaagtgaaataagccaggaacagaaagttaaacacctcatgttctcactcatatgccgaagctaaaaaagttgatctcatagaagtaaaaacaagaacagaggcttctagagactgggaagggtagagagatggaggaatagggagagatttgttaaaggatataccaaattacagctagatagggggaataagttctagtgttctataccactatgggatgactatagttgacaataatatagtttcaaatagctaaaaggaggatattgaatgttctcaacacaaagaaatgataaatgtttgagacggatatgctaataccctgatctgatcactatacatgataggtgttgaaacatcactatgtaccccatcaatatgtacagttatttgtcaatttttttaatgccaatttttttttttttttttgaggtggagtttcactgttgttgcccaggctgtagtgcagtggtgcaatcttggctcactgcaacctcggcctcccaggttcaagctatcctcctgccttagccttccaagtagatgggattacaggcacccgccaccatgcccagctaatttttgtatttttattcaccatattggccaggctggtcttgaactcctgactgaggtgatccacccaccttcccgccttggcctcccaaagtgctgagattacaggcatgtgacaccgtgcccggccagtgccaacgtgtttaaacaaagaagttgctttgaaagaaatgtgtctttacagccacaaggaccacagagcagggcaacagctcaaaaaagactcaggaatacctgtttgcacagcccctgcctccaccctagtgctttcaacctgcagaaactggagagggatctggaatattctacccataaaaactattctaagagggaaaattgaagtagccaccactctaggccacccaaagtccagaaacaacttgtaactcacatttcaaaacaattcccttaaacccagtttccttttgttttcattttacaaatgtcacacagtttttcataaccaattctaatcatgtatgtttctaagcagatttcagtttctgttgcttctcacagcttttgaagctgttttctacatattcaaactctgaggggtatgatttctctgcctggcttagagctccactatgacccaccttttagaatgaaggatgagaaccttttcgtgatgggttgacactgtggttgtagttatctctaaaataaccaggacacccactcctaagcacactgccaaggctcaccgaaaacaggctttacacacctttgaaccattcccagagcctggcctgggaccttgtacacacatggaaagaacttaataatttcttgacatttctcccttgtgactgtgctaattggtcccccagacaccccattccacatatcagctaacctggcttttcccacatgagattatgtggaaaatcagcatcccacaagacattaacaggcattactctgaagtctgtagccaaaaaagttggaaaaccaagagagacaaagcttaaagggtttattttccacaggactttgtagagccttcagaatactttgtgcccagcaaatctttaggaggggcctaggatgtgctggctttcccaaatgtatttgaccaaagaatactttttttggcagaaatattaacatcttaagattgcacagaacgttttagagaccattaagttaactgccactacaggaaagaacaaaaaatgcacactccacttgcaaatcctccctgcaatacagagcattcaggtgctctgccttaccaagcgcctctgcttcaaggtggaagcaactgcttactgagtgcttcagtggccttgccctgctctgggaaatgactccatttcaaccatcccaggcaacaatagccacagtgtcaacacctagaaccagtgaggcctattagaaggtggttgtttctaacaactttttacaagacagcaaagtcaggaacaagagaaggcagaaggatactccaaatggaatccaaagtttggttttgttgacatgagtggcagtggagagacaactgtggggtgaacacccatgagtttgtagggcctgctgtcttcagagcagcctcgagaccctcagccagcctcatgcttccacccagcaggcagaggttttgggcaagttagacttgagagtaattgagagagaagcattgtgagaacagatgtcctgggtgaggtgccccctgggcagccatctgccttcaccctggaggaaacatgcttccagcggggactgcaaagtaacaccctggttggccctttccccacaacacctgccctgtgcagttggggaagcggctgtcacagatgaattcacagatgaatcggcagagtgcgctgatacaaaggtgggctctgctctgagtgtggcctgcacagccaggggacttccaaatgctccttctctgttcagctccctttgtgttcacggtataatgacacacactttctcattggattcttttcactcaccagctttttgtcgataaagatacgattgttaatgctgtcggggcatcgcacgacatccacctcctgaagattgacaatcgagaagatgagctggtgaccagaatcaactcttggtgtacacgtttaatagacagggtgagtcaatcccaagccatcctagcaggctggatgaacttttctagctgacatggaaatcctccctaggtagtggatagaattttcattaaggaatgaaatgaaggaagaaataaaattaaggattatagaattccacactgaagacaacattgcccagagactttaaaacccatgggcttcatcattttcctaattcctacctcaaatatacagagatcagcagaacctggggaggcgctgaagcaaatgaggtttgcagatctaaaggaactattttccccttccctcaaactggattcagtgaaagatattaaccaatgatctgatgtaaggaatcgggctttggtttcactcctcagattcacaaggatgagatcatgaggaaccgcaagcgcgtgaaggagatcaatcagtacatcgaccacatgcagagcgaactggacaacctggaatgtggcgacatcctagactagatgaatgtcagccacaggagcttcttcaaaacatagcaccagccccagccaggagaaggaagtgcacacgcctcacccgcacctctagagagttgctgggcatctctcaaccgcgatccccaacaccattcttcccccacccctggaaaaacttccaaaagtagagaaaataaaggactcatttcacatttcccctactcataaaaaaaaaaaaaaaatcagctgggtgcggtggttcacgtctgtaatcccagcactttgggaggccgaggcatgcagatcacgaggtcaggagttcgagaccagcctgaccaacatggtgaaaccttgtctctactaaaaatacaaaaattagccagatgtggtagcgtgcacctgtaatcccagctactcaggaggctgaggcaggagaatcacttgaacctgggaggcggaggttgcagtgagccaagatcgcaccactgcactccagcctgggcgacagagcgagacttcgtctcaaaaaaaaaaaaaaaaaaaaaaaaaaaaaaaaaaaaatgttcatgtaggaacaagagaaagagtttgagatgaacagccggtcccaggccagctgacagagcaactcccaagggcactgccatcagctagattcttggctgtggcataaagtcagacacgtgcccctgccgtttcccctgccatgcctaggcaggctgccagccacaggcaaaaggaggccggtgtgggctaagaccttctctgctctgggtgctgaggggcagggaagcaggaggagaggctgcagctcccaccacagtgctggggcctgggcctgcccaccaaggctgaggttagccacaaggacctgaggaccctccagaagagcagagtgcaggcagggcatcccagctccaccatgtcacccccgcagccctggtgtcatctgtgacagtacctcacagtgccttcgaggaacagttcagggagacagtgcatgggaagcgtggagaggcacccagcatgcgatcagtgccctgtgagcagggttgatgccattaccttactcaggctggcaaggacacagggctgagagagcctgtctgcctgagaaccactcttcccccctgccctcttactggcctgacaccagaaagtagcgcctgcctcctgggacactagaggtggctatgtcaggaggacccttaggactcctgggtgggagatgagcggaaacatgcacatcaggtgaccttgtcaagcctgtccaggcttttagcccagaaacaacttctattttctactttctagagtaaatcatttgttttagaacagtaggaacaaatagaaacaaccagcttagaccacaattgtttcaaaagattgtttgattaaaagccagccaaaaaaaagccttcaggctgaggctgaagaacacaaatagagttgtctgtggattacatgattgtttccccagtgcaaggttcctgaccacaggcagcagatatccaaacacgccatgggagataagctgtttaaccctctggaacctagacaaaacaggaagaatggagaagtgcagaggcatacgtgaaaacagggctcagcacatttccagggtggagaaatatttaataaaatcagagtcgagagaaagtcacttgcacaattcatctcctacattcactgctggccaggccaggggcacctgggttgaaatcaggctgacctccggacagccgtactagcgcactgtgtctcggggggaatctcagggtgacgctgaggccgagtccccaaaagccaaggaagccagccccacaggctggggagccctgaaggccgggggagctgtggctgcactgcctctatcctgctgagtgtgctctgcccaggcctcactccttcaggagcttgtgcttgactgtggtgctctcggagcagagatggatgaagagggtgccggcggcggtgcgggcccgcagctcctgcagctcatagtcatgggcccactcaatgttgccccacttctggatctgagggaaggacaagacaagttgctgggtgagtggccagtgcctggctgcctcctgaccaaagccacgttccattccaataggttggctgagggcaacaggtttgtatcttgccaaaacacatgagacatgcctagggggaggtggcaggtaagaacacccaggtacgccagacacggtggctcacgcctgtaatcccagcactctgggagaccgaggcaggaagactgcttgaatccaggagttcaagaccagcctgggcaaatatggtgcaacctcgcctctacaaaaaggtttaaaaattagctgggtgtggtgggggtgcacctgtagtcccagctatttgagagactgaggtaggaggactgctttgagcccaggaggctgaagctgcagtaagccaagatcacaccgctgcactcccacttgggcaacagagcaagaccctgtctcaaaaacaccacacacacacacacacacacacacacacacacacacaccccaccaccccacccccagggagccggagcaggcacctgtgctctctgtggcatggatggtctggaagaagtgcagtccaggcccaggcccagggccagtggctgcccacccaccactgggcaggctgggtaccagaaccacccatgtgacttctttgaggaggccttatgtgccatcccttctcctacacttcctcccagaaagcctgtgaatggacagcctctccaagttgccttgccatgctgggctacaagtgccccccagcgccatgtgggtggaataactaaatcaagtaaggccacgcagtggcttcaactctgactcttgtggtagtcacagaactacagatgcctctgctctgcacactggggacaagttgcagattctctgtctggagctctaaaaacaagagggaggaacgctcagacacacgatgtggctgtccagacagtgtaagtccaaccaaaccttgctggctcctccctggctagttgcccaagaggcctggcctggccgccccagctcatccaggaactcagaatccaccatgctacacaagctatttgaacttctgggctgcctggtcccaaactgtacaattgtaatatgtcatctgaagagtattccatactttcattgtataccatcacatacataattcaggttattcctctgtttgtagaggatcgaaaccaaagttcagagaatgatggcctggcttgggtcccatagtcagaagcagagcccagactggcttcccaccagccctacaagtcacccccttcctatgtaatcagttctgacatccagagaatagtagcgggcctcctttgttatacaaaaatagttttttccctggcatttttctgagcagaagactacaagaactagggaaatacatcacaaaaagttttgtgtttttttgtttgtttgtttttaccatattagggaccaattcataatagcaattaaccttctgaggttggtggaataacaataaaaagactgcaaagatggctataattttcagagttaaaaaatgcaaaccatactgtggcaaaaccttaattctgagcccactaaatcaaaacttgtatacaaacagcagctacccctatgctcctctgccagccagataaaatgtcagggtatgaaggctcagctgatgaaggagcacaaacgggttctcagtcatcttggcagggcctgttctgcaggctttatcaagcccagatggtctttatccacccgtgaacctccttgtgcagagtgaggcctgacggccttggccctaaaatcaccagacctggcttcaaaccccagctggcacattttccagaggtgcaaccttgcacctccatttccttctgtgtaaaacagagataaccacagctcctacctgcccaggctgctgagaggaggtgagatggatacaatgcaggaacacagcggtagcacttactgttatttttttattgttattatcttaccttttttttttttttttttgagacagggtctcactctgtcacccaggctagaatgcagtggcacaatcctggctcactacaacctccacctcccaggttcaagcaatcctcccacgtcagcttcccaagtagctgagactacaggtgctaatttttgtatttttgtagagagagggttttgccatgttgcccaggctggtctcaaactcctgacctcaaatgatccatcctcctcagccacccaaagtgctgggattacaggtgtgaaccaccatgccaggcctacttgacaatacttctgctggtccttgattttgatttctgcgtgtacataaaagtaataaaagccaagtatgcataactatatttcagatgggttagctgctcccccaaagtgagtctgaactaggaagggggaggcgggacctgaggtgctgctcctcacctggtactcctcctccaggcgtgacagcagcacggcctgctccactgtcaggcgcaggtcaatcaggcccaaggttagcaccatggacttgagctgggcagctacaaactcaatccctgcagggacacaagccaagtcagaacccaaaacagggcagctgccacaacctaccccttgtgagtcccagcagccctagcagagaacaggagtgagtggtgcaaagagccatccagcgattgtcccactcttctgaaagagcactctggtcttccctgggggtgatcctcctctgctcttacctagtgagacacatgacccgaacttggcaaatcagagctttccgcacccagtctagtgattggttcatggatggacatgtgacccaagccagggcaatgagattgaactcaagacttctgctggcgaagtcgaaggtggaaaggtgtgagcctagagcgtagagtgattggctagcatcagagccacccagcctccacactcagctagcccagaacactctgtgcctctccactcacaggacctggggaggggcaagtacaggcttcagacactgatggccttcacagccacctgccaagcccacaagaaactccatacatgccttgtaaagcccatgtgttgtaagatgccaggtggctgacgagcacctcccgagttttggcagggatgctgggtcccattatgctggtggaggagctgatctccacgccgtatctgaaaggaaaagggcttcggcatgtctctgtcatgctgtagcccaagagcagcccaccttttgactagaaacaaaggcctaagcttcagagcatgtgtgtgcattggccaaggagctagtcttgactacaggagcaactgccaccatggtcagtggcctcccgacctgattttctgtccctcaaaagcaaacttggaggaccaagaaactgtgctgaatgaagggatggttcctgagtcatgtgagctagggctcggttatacgcagctgcctgaaatgctcattcattcacctggaatctccatcaaaaggccatctgccttttacatctctttaaagtttttcacatttgaggacatataaaagttaaaaacaatatttaaaatggttttccttaaaataatgtttatgtcatatatcatggaggttttcttttttattgagacagggtctcgctctgtcactcaagctggagtgcgctggcatgatcttgactcactgcagccttgacctcctaggctcaagcgatcctcccacctcagtctcccaagtagctgggactacaggcatgtgccaccacacctagctaattttttttgtagagacagagtttcaccatgttgctcgagctggtctcaaacgcctggactcacgcgatctgccaacctcagcctcccaaagtgttgggattacagccatgagccaccatgaccagtcagcagtcattttttcaaacttttttttttttttttttttttgagatgaagtctttcttgctttctaccccaggctgaagtgcagtggcatgatctcggctcactgcgacctccgcctcctgacctctgcgcctggctgagaagatacattttcaagaataatcataactaaataaaacagaaaaacacaatgggggataaaaataatttttgtaattttcttccatatatcactgatttttttctgttgcttaaaaaaatccggctggggccgggcgcggtggctcatgcctgtaatcccagcactttgggaggccgaggcgggcggatcacgaggtcaggagattgagaccatcctggctaacacggtgagacgccgtctctactaaaaatacaaaaaaaattagccgggtgtagatggtgcatgcctgtagtcccagctacttgggaggctgaggcaggaaaatggcataaaacctgggaggcggagcttgcagtgagctgagatcacgccactgcactccagcctgggtgacagagcgagactcctttcaaaaaaaaaaaaaaaaaaatcctgctgggtgcagtggctcacacctataatcccagcacttcaggagaatgaggtgggcaatcacttgaggtcaggagttcgagaccagcctggccaacatggtgaaaccccatctctactaaaaacacaaaaattagctgggcgtggtgggcgcctgtaatcccagctacttgagaggctgaggcacgagaatcgtttaaacccaagaggtggaggttacagtgagccaagatcgcatcactgcactccagcctgggcgacagagcgagactccatctcaagaaagaaaaaataaaaaatccttgctgaaattcctaatagtacaaatggactgtaagaaatggctaagtttttctataaactcttaaggatgaggtatttcctgccacaagaatctgatgattttatactatagcaaagatctctaggcacctaaattattattacatttcattagattctgaaatgacactgttttgtcacattcccacatagtattgtagtctggtctttagagcactgcctttgccttctcttttaagacccaaggacacctgccacattgtgagcatcgggcagcatgtggcaaatcagtgaactgattggtaacatcacttttgtggaaaactgctataccaagaaatgtgccttgcaagcttagaaaataccacagtcaaggtagtaccatgaaagccagcccttccaaatttcccttgggatcaaatgaaattgaatttattttgccaccacatcaataatccattcaactttgcactcaagagtcttcctattaaagaaaaatatttcatatcaattcctggaagctacatatccattggatgttacccgtaattttgcaggaagctatccagacttttctccaagtgcatacatatcgtatatgttgttctgttattttatttaatagtacagcaattgtgacaaagattaaaatcactgccaaaatttgaacatttactgtgtgctaataagcaggatgctaagcctttacatgcatcaattcatttattcctcctcaaaccctgagaggtagggattattagccccatttatagacaagaaaattgaagctcagagagatcaactcattagccaagtcacacagctgagtcttcagcagagctgggattcaaaccgacactgctgctctgacccgctggcagaaggtggcctgggaactccactgcttctccaaggacacagagctgcccctacacttcatgaaccgctacagcaggtgtgctgtacctagtggctgaaattaaatttgaggtgcttttttcccaggatgaccctatccctgatcatatgaggggagccaaatcccacgagtgctctgaaatcagaaagctgactagctaagggcactagttttccagcgtgaccccctgacccctacactccaccaaacgcaggtgcccagtcagtgctttctgcagggctgtacatcttaccttttctcagcccattcgatgattggatcccactcattcctttgaagttccactaatgtctcgggctcctccaccctgtagctaattcattgtaaaaataaccttcattaataaaaaagtacaattccttcattcagtgatagaaaaggaaaaacacaaaggacaacagcaaaaacttcaccaccaccatcccagccccacaagtcttttcccctaaagcagtggttctcaaagtgtggccctggcaccagcatcgcctgggaacttgttagaaatacacattctcaggttgcatgcctacagaaatcagaacctctggaggggggcccagcaatctgttttaacaagccctctaggggattctagtgtaagcttgagtttgagaaccactaccctaaatgcccccaaatatttgacaggtccaagcttgccacactgttactgccatcctaaagcagatccaatctactaactgcaaccctgggtccacacccgcttgacccagatgctgaatgggaatgctgtgccagatgctcagtctttgcatctctaccctcaccccctccaagagactgtgcccctggtcacagaccaaatagcctgtttatacctcataagtccacccacctcctggctacagatgcagctgctggcacagatgccagacctgatgggaccaagctagaggtcaggctgtgccatttgtttgaccaagagacacagacatgagccagttgagaggagctgagctgcagggcctcatgggatgggaatccaagtgggcactatggaaatccactgtcttgtgtaagcaaagtggggaagagaggtcatgagttatgcaggaaaagctggggtgctgggaggggcagatggacaaccagcctttcctccctcaccttcctctcaccctagtagggcacagggaggagctctgacattggatcttccagctacctttcctggtgacccaactgtccttcatttcctgtcaggatccctgtatagttttcaagaatcccctttttgtctgagctaggttgaatgggtttctgctccctgcaatcaagtgaaccctaatataaatggagtgggcgttcccactagctatgggtcacccccttcgaaagcacgcctccagccatcagtgctgacttcctgtgtcatcgtgagatgactcaggatcctagagcacttgggctagcaggcacggtgctgctcaatcatttccattgtttctcaactttcctttggcatcactgaacaattagccaagaaacatagacacagaggagaattcagaactggagaaggacactcctagttatcagcatccatagtgccaaggatgctttacctgagaaagtgtcggtgggcagaagtttaaggtcacaggcccccctaggcctaaggggcctgtggtcacggcacctgcaagagctgcataaccaccctcccagcctaaggagcagcttctgggctagagaagaggggtggccatgttctgacaccattgtagcccgaggagtcctcctcctaaggggctacagagcagccaagtgccaaagtcaagtgggccaccttccttgtccttgcaataaatggagagggtttcttcttccactgataaccatctgggcaaatcaggaaaaatagcctcaatccaaggggaatgcccatctaaatgtccattaccagatggtgtcggtgtccagaaacttcacggctgcccggatcagctgatccttgtttctctgggttgggttgtccaatgatgtgttgcacaatgtggtctgaatcaaaggcaaaaaccaccctgtcactgcctgcggggctcaggcaaaagccctgctttcctgaggacaccacatctgacacatagcagacagcaccacagcacagccctccaccagaggcgtctgcattaccggagcagcagcacagctactgagagtgtgccacaaccaggctccatgccaaatgctttgtgttgacgctcacaggactcgagggaagcttgcagcagccccaggattagtgaacctcccccatggtcacatgccttttattaccaggctctagtgtatttaatttaatcctcacaacaaccttttggagtaggtactattattatgtccatctgggatgtgaaaactgaggcccagacaggttaagtacattgtcaaatacagttaataagacatgtattagtgatggagctcaaatctgactggaaacctttaccagctgcctcccttacaccttagaaagtagggaaatagcccatgcaaatcgggatcaagattatttttttcggccaagtgtggtggctcacgcctgtaatctcagcactttgggaggctgaggtgggcagatcacctgaggtcaggagttcaagaccagcctggccaacatggtaaaaccccatctctactaaaaatacaaaaattagcctggcatggtggtggacgtctgtaatcccagctgcttgggaggctgagacgggagaatcgcttgaacccaggaggcagaggttgcagtgagccgagattatgccattgcactgcagcctgggcaacagagttagactgtttaaaaaaaaaaaaaagatctttttttttccagacttaccttgtcaataataggctgcttaggttaccctattcgtttgtagccctaatcaccctaatttcactaggttgtcaaggaccaggccaaccacctcagcaggctgtgatgttgggaggaggcccacctgggtttgcaaaggttgagcacagcagcggctgggatgatagcagctgactcctgtattgactgagtgcccagtcagtgctggggaccatgccaagggctttcttgcatcatctcatctcatcctgaccacagctccgtgaggtgggtactattatcactcatctttaatcggtggggaatatggggctgcgaaaggggtagcaacctgcccaaggttacagtttagaagctgcagaggctggacctaagagtgtagctgggcccttccttccccaggcagccttggtgcctaggcgagccactttggtgtggacgagggggctggttctatagggagtcttcctcacctcacccatctgcctccagtggatcttatattcaactaatatttactgagtaccaactaaattacctgctagtggctgtccagacactgatgagtaaaacagacatggctcctgcccttctgttgcttaccaggcagtggaagagacagacaataaatgtgcaaacataaaacaattataaattgcctaagtgctgacaaaacaaatggccagctgctgtcatagaaaataagagagctgggcagtcaatgaaggtgacatctgtcctgaaaccaaaggagaaaccagccatccagcacagtgttcctaggagagagagctgcaagtagccgggccagacaaggaaagagtttagcacgttagtgacttgagaggaggtgaatccctgggggccagacaggcaaaggaccagcccccagggccttgtcggaatttggtaaagggtctaccctacgaagccctgggtgggtctcagggtccaggttcacactgtgaacttgttaccaggtgcatggtgtagtacttgatggtatcctgctgggaatcccactcagtagccactgcaatggccagggcctcgctggggacggtaaagagcttggcttggggagttttcagcttcctgtggtccaggtttatctcaaagccaccttgaaagatcaaatgaaaaactctcagggatttgttaagtggaatcaagtgaccattcctatatttagccacttgaattggtgcagacaaagccaactctgagtcccttacagaaatatatctcacaaaaagcaggaaggataatcgcaccatgaaaccagctgaagatgaaaaatgttcccaaccattcacaaaaaaaaaaaaaaaaagaggcagtcaaaatttcagacactcaccttcaccctgtgtgatgctgacattctgataaaacctcttcctttctgtaagaaagatttttcaaagaggcagtttaaaataacgttgagacaactcaggaagcgacaggaccagcttgtatcattactgctaatgttgattgattggcttgattttcatatccccattcaaggtctgccctactcaacacggtataatcaaccgcttctgattaaagctgggggaagggaacatctgatctccagggagaagggaggaacagaacatgctggtcatacctctgccagccccgcagcctggggacaagtctgatcaggagcatctcggcatgctctcccaccctccccaccaccagtgccacctcatgccagcacaacgagttcaaacctaaagtcggtgtctgagtgggacaaagctagagacccatttcaggcaagactctgatgcctctaaggagtgagtggaaagccagtgtgcgtgcgcagggtgtgcgtgtgtgatacatcggcaggatacagagctcccaagggcatttcccatcccctctctccaattaattaacctaattaaccagcttgcttgtgtatccaacaggaactccaaacatttccttcaagaatgggaaaatctatgtcctttgttttcttttgaaaataacttgaataaaatcttacatgaaacagtctccttcttttaccctggagggattaacaaccaagagcacttctaaggaattatgcagattccctcaactgataacaaagaagtcacattttggaagctataagctataactcagtctctcacatctgtgacaaacacaaaactttcattcattcattcgtttgttcactcgttcatgtgttcactgagttctcaaagtctttggagaccctaactgaagttatttattggaaataatgatgcagcatgtggaagaaaaaagagtaaatcatttgctttatttatttattttattattattttttttttgaaatggcgtctcactctcttgcccaggctggagtgtagtggtgcaatctcagctcactgaaacctccacctcctgggttcaagcgactctcctgcctcagtcccctgagtagctgggattacaggcatgcgccaacacaccaggctaatttttgaatttttagtagaggcagagttttgccatgccagccaggttggtctcgaactcctgacctcaagtgatccaacccgtgagccaccatgcccggccaaatagtttgcctttaacgctaaaaaaaaaaaaaaaaaaaaaaaaaggctggtcgcagtggctcatgcctataatcctagcactttgggaggccaaggtgggaagactgcttgaggccaggagttcaagacccaagctgggcaacatgagaccccatctctacaaaaaatacaaaaatgaggccgggcgcagtggctcacgcctgtaatcccagcactttgggaggcggaggcgggtggatcacctgaggtcaggagttcgagaccagcctggtcaatgtggtgaaaccccatctctactaaaaatacaaaaattagccaggtgtggtggcacatgcctgtagtcccagctactcgggaggctgaggcaggagaatcgcttgaacccgggaggcagaggctgcagtgagctgagatcacgccactgcactccagcctgggtggcagagcaagactccatctcaaaaaaaaaaaaaaaaaaaaaaagaaaaattaaaaattagctaggcatggtggcacatgcctgtagtccccagctactaggaaggctgaagcaggaagattgcttgagcccaggaggctgaggcttcaggtgagctgtgatggcaccactgcactccagcctgggcaacagaacaagaccctgtctcttggggaaaaaaaaaaaaaaaaaaaaaacaagcttaagttaaaatttcattaattcaaatagaccatgaaaattcaggagaaattagtatgtgtgcatggacagggaagggtaatggagaagtgggcaactggttttactccaaatattttttttctttttcttttttttttttttttgagatggagtctcactctgttgcccacgctggagtgcagtagcgcgatctcagctcactgcaagctccacctcccaggttcacgccattctcctgcctcagcctcctgagtagctgcgactacaggcgccgccaccacgcctggcttttttttttttttttttttttttagtagagacggggtttcaccgtgttagccaggatggtcttgatctcctgacctcgtgatccacctgccttggcctcccaaagtgctgggattgcaggcgtgagccaccgcgcctggccttttttttttttttttttgagatggagtctcactttgtcgcccaggctgtagtgcagtggcgcgatctcggttcactgcaagttctgcctcctcggttcacaccattctcctgcctcagcctcccgagtacctgggactacaggtgcctgccaccacgcctggctaattttttgcattttgtttagtagaggcggggtttcaccatgttagccaggatggtctcgatctcctgacctcgtgatccgcccacctcagcctcccaaagtgctgggattacaggcgtgagccactgcgcccagcctactccaaatatttttatgttttcccatcatatcagttttctataaatctcatttgctatcactaatacttacagacagagggcccaaaattgcattccacatttgcacttactaaactaaggcccaaattgttttcccacaaaaatatgtgtgtgtctaccatgtgtcttggcacttgggatacaagagtgaataaaatagacagagtttaaagtgtttttttaggccaggcgcggtggtcacgcctgtaatcccagcactttggggggctgaggcgggcggatcacgaggtcaggagattgagaccatcctggctaacacagtgaaaccccatctctactaaaaatacaaaaaattagccgggcgtggtggcgggcgcctgtagtcccagctacttgggaggctgaggcaggagaatggcgtgaacccgggaggtggagcttgcagtgagctgagatcgcaccactgcactccagcctgggtgacaaagcaagactccatctcaaaaaaaagaaaataaagtgtttttttaggatcagatctgtccaccaagatgatgttgtcttactatggcaccttcatctgaaatcacaacactgattatctcatacgtttgacactaaaattagaagtttacagcaccctactgcttttaaatttctctacatgctgtcctggtcatatccaaatggcaggctagacatgggtctggaggcctcctttcctctctcaggtctggagtgaggtagaccatgtcctttgtgttttccaatgcaacaggctgggctgcatgtataaaagccaggccaggcaggaagttgggaagggctctgaaagctctgactcaacactggggaaagggtcttcccatgtcagcaggaagagccagcagagtgtacaaatgtacaagagtgagcactctagcatacttccaggcccggtctgggaagtgaacccaagagacctggggcagacgaacagactcaaggcaggaactgccagcacagggctgaaccttcaaaagctcctgggacagccaggtttcccaagagggaagtcttttttctgttttgttggccaggctcacttctgtaactgaataagaaaaaactagatgggagtgggatagatggagggcagggaagaagccaccaaaaatttctccaagcagaagaaaaccatgcagaaaatgagacggcagaagggcaaaagaagcccaggggccgccaggcctcagattagaaggcaggtgcacatagatgtgttttagccaggggctctcctgaatgacccactgacacttggaggggcaaacgtgtcttggaacaagctttggtgagtactgatcatgttccaggacatacaagtcctggggatgggacatgtgcaaagctcatctctgcactctccagccatttactgtctagtaggaatacagacactaaaccaggcaaacaataaggtgacttctgtgatggggcaggcacgtggaacgattagtcagaattaaattgcaacttgaaggtgaggcaggaggtaccaaactttctgattgattcaattttttttttttttttttggcagagcagggctgtggaagtagtttccagatgaagaaacaggttgcatgaaggaccagggtttctagagagcagttgtggactagacagatggtcagaaggagaatgcaagattctctaagatgctagagagggcaatggggccacatatgggggacatgtagatcactgcaaagacagcaaagggagccaagtaaaggctccacacaggcatacaggaacttgatctggggccgggcatggtggctcatgcctgtaatcccagaactttgtgaggccgagggggacagatcacttaaagccaggagctcaagagcagcctggccaacatggtgaaaccctgtctctacaaaaaattaaaaaattggcgaggtgtggtattgcctgcctgtaataccagctactcaggaggctgaaaatcagttgaacccaggaggcggaggttgtagtgaaccaagattgcgccactgcaccccaaccagggtgacagaatgagactctgtctcaaaaaaaaaaaaaaaaaagaacatgatctggacaattcgtttgggggatccatgttccccaacaatgtcacataagacaaaatgtgagaccaccagaaacctatgaagcttccatgttctcggtgaatacatggttagcagacatcaatggtaaccctgtctttaaagatgaaaaaaatcagcctagctttgtaggatcatgcagaactggcctttcctttagaaagattaccagcctcaggaaccacaactcccacagtgcaccaagaagaggaagtactggtttcagagctgtctcagtgcctttatcttttaaaacagtgccatctggtgggccttaaaccttaaaggtgaaattctaactccagggccatctgtaatcctagggcggctctaaccaactcttttcaggtatcaaaattcttcagcccaaatacataaagaactcttacgactcaataacaaaaagacaaataggctgggcatggtggctcgagcttgtaatcccagcactttggctggctgaggcaggtggatcacttgagtccaagagttcaagaccagcctgagcaacatggcaacaccctgtctctacaaaaatacaaaaattagccaggcatggtggcacgtgcctgtagtcccagctactcaggaggctgacatgggaggatcacctgagcctgggaggttgaggctgcagtgagccatgaacacacccctgcactctagcctaggcaacagaccgaggccctgtctcaaaaacaacaacaaataacccaatttaaaaatgttcaagtctgagagaccgaggtgggaagattgcttgagtccaggagtttgagaccagcctgggcaacatagcaagaccctgtctgtacaaaaaaattttaaagtcagctgggcatggtggcacacacctgtagttcccagctactttggaggctgaggtgtgaggctcgcttgagcccaggaggttgaggctgcagtaagctgtaactgagccacttgcactacaacctgggtgacagagcaagaccccctctctttaaaaaaaaacaatggtcaagggatctgaatagacgtttcttcaaagaaaatatacaaatagccattaagcacgtgaaaagatactcaacataattcatcagagaaatgcaaatcaaaaccacaatgagataccacttcaaaccctttaggacagctgtaataaaaaagacaacaacaagtgttgagatatagagaaactggacccctcaaacactgctggtggaaatgtgaaatggcacagccaccttgaaaaacagtctggcagatcctccaaaagttaaacagagttaccatttgacccagtaattctactcttaggtatatgtccaagagaaatgaaaacatatgtccacacaaaaacttgtacatgaatgttcatagtagcgttattcatattagccaaaaggtagaaacgaccctgtgtccaccaatggatgaatggataagtaaaatgtggcatatttacacatacaatggaatattgtttggcaataaagaagaatggagtcattgatacatgatacaaggtggataaaacttaaaaacgtttggtcatggtggctcactcctgtaatcccagcactctggaaggccgaagcaggaggatcacttgaggccaggagtttgaggtcagcctgagcaagaccccatctctacaaagcactaaaaagctagccgggcatggtggtgtgtgcctgtagccctagctacttgggaggctgaggcaggaggatcacttgagcccaggagtttgaggttacagtgagctgtgatcgtgccactacactccagcctgggcaacagaatgagacccaatctcttaaaaacaaaaaaaaacaaaaaaaacccaaactttaaaacattatgctaagtgaaaaagtcagtcaaaaaagaccacattctatttatataaaatgtcccaaacagggaaatctataaaagaacaaaggaaagtagtagttgccaagggatggaagtagtaagggtggatgatagctaaagggtgcaggtttcttttaagggtgataaaaatgttctaaaattgattgtggcaatggctgtacaattctgtaaatatactaaaaactattatatttacacttcaagtaaatgaattgtatagcaagtaaatatctcaataaagctgttaaaaaaatccttcaggccaaatgtataacatttagcaaactttttctgcaaagaatcagatagtaaatattctaagctttgcaagccatacaatatctgttccaactattcaactctgccactgtagtgaaagtagccatagatgatatgtaaatgaatgcatgtggctgtgttccaataaaactctatttacaaaaacaggtggcaggctggaccctgatctacagactacataatctccctcaatccacaccactattctatgaggatgacaaggcagctaatgcctcggaggtgatagagaagctaaacatcttgtcttggtgacagacaactggtaaatagcagagacaagacttctagccttgacttcatcaggcagttgcattcagccagatacgctgaatagataggtttctccagaacacctgccactctgggagtcaatagacctctgataagctggtgcagaactaaactgccacaacaacctcatataggtcttcttgttgcaatatctccttctccaacacctcagtgaccctttcgtaaactcctcctctccttctgataaccttcaatggcatggccattcctaagtggccaagttcaatcagcttgctgactgaagtgttcattgagaagaacccactgcggtttaatcttctactacttcaaatacgcacaaatatctcacaactggtaaggtctttagagagaacacgtgggggtcgggggccgggcgcggtggctcatgcctgtaatcccagcactctggaaggctgaggagggtggatcatgaggtcaggagatcgagaccatccagactaacatggtgaaactccgtctctactgacaatacaaaaaaattagccaggtgtggtggtgggcacctgtagtcccagctactcgggacgctgaggcaggagaatggcgtgaacccgggaggcggagcttacagtgagccaagattgcgccactgcactccagcctgggtgacagtgcaagactctgtctcaaaaaaaaaaaaaagcatgcatgggcctgatttatgcacctcccttctcattcattcattcctattttctttcacatttgactacctaccatgtgccaggtacttccaagagcctaactagtaagtttaggctttttaaaaaggaaaagaaggcagtagatcaagtgccaccattatgtaaagtgagcatccacaaatctaaattaaccctttgtggtcaggcatggtggctcacgcctgtaatcccagcatttgggaggctgaggcgggaggatcacctgaggtcaggagttcatgaccagtgtggccaacatggtgaaaccccatctctactaaaaatacaaaattagccacgtgtggtggcggacacctgtaatcccagctacttgggaggctgaggcaggagaattgcttgaatctgggaggtagaggttgcagtgagccaagatcacaccattgcatgccagcctgggtgacaagtgtaaaactccatctcaaaataaataaataaatacgtaaataaataaattaattaaccctttgctttttgccaacttggtgaactcctgaatgtgtcccctttgctatgcctccctgggatgcccttcctttctcttctttactggcccttcatggcccatttccaggcccttcccctgagtcctgcaggtgaaacttcagctccctgctgcatccagcccccttccccatttctataaagttatagaacttggctgggcgcggtggctcacgcctgtaatcccagcactttgggaggccgaggtgggcgggtcacaaagtcaggagttcgagaccagcctagtcaatataaaccccatctctactaaaaatacaaaaattagcagggcatggtggcagacgcctgtagtcccacctacttgggaggctgagaccacaaaatcgcttgaatctgggaggcggaggttgcagtgagccgagatggtgccactgcactccagcctctgtgacagaggagactccgtctcaaaaaaacacaaaaaaacagaagaagaagaaaaaaaaagaacttgacagccagaaagatcctcaaaggcaacctagtacttcaacgcatggagaaaaatgaggaagtagttgcatgcccaagatcacacagacctcagaggttcagccagcatcagatcctagatttgcactcctgccacaatgccaaactgcctgtgaagttctggattttctaaaacaggcagtgtcagggaaaagtccctcataccttgctgtcaccctggacacgttctagatacccaacactctcccacctttttgctgaactcctactcatctatcatggctcagcttaaacaaacgccctttcacccaagacccattctaaaccctgaacatccccaagatgggagtaagcgattctctgtgttctcacagtttctttgtatgtcccttatcaggatattataaaccacaatttaatcagaatattataaccttttgcaatgaacagtgaacatcattcaggtgggcctttttcttctttaattgagcttctctaccaatacatacaggtgggtcttaaagacaaccgtgcctcctgcctccagcacaataaaactaattgaatggtgggagggtgttactgctcttcattcactgaaatgagtcattctcactcttaccctgacaccactcaccatcagcaatgaaagagccactacttctaagcttcatcagagttggaggtggaggtgactccacagtcagaggtggaggtgtcaatttctatttaggagagaaggctgcagatggcagaggttgtggtaggagggaaagtcaggaaacctgcagcagaagtgcccgggatggaggaatgaaggcccaggttctaggtcccttctgggcaggtcttgtgttgggcagtggagacacggaaaacagtcagacagacaccacaaacctctgagagagtctgcctgtaacccagacgaagtcctgattcagagcccaaacttccccttttgaaaacaaagatgacacctgctttccttattaaagggagggcagccataagctttgagaaaacctgcacaggccaaatatcaattactgtatcgtgcgtgactcgctgttccctctcgggtcgtctgcccttgtctgggcttcactttctcatctgtaaaaagacctgactggcctgcataacctcatgagcctgaaccctgcctcagttacttcgctttgcacagccgaagcccgaagcccaccttaccccagctcggccccaacccaaaagaacatgtcatggtcttacctgtcggcggggcgtaagcccgggctggagacgggatggttggccccggactcatagaagcgctggggccacccgccggccgattcaggagacggcgtcccccgtcccgcagccggaggcagctcctccacatcgcgcccgagggtctgggaagatgcgagacgcgaaacctggagcaggaaacacagagcgatgggatccccaaagccgcacggtcgggctgtacggaaacctctcaacgcctcctcagagccctcaacctcccttggacgccgccatcttccgcatgacacctacggcgcgccgtcgccgccgcgcgcctcctgcgcacacccccagtcaatcagcatcacaaacgcacctcgccccgccccctccacgccgcgcctcggcgaggagactacaagtcccagcgggccgctcgcgcaccgcgccacgtgttttctcctcccgccaatgggcggaagcgccgcctgagcctgctcccgccccccaggctcgcctgagccaatcggaaggggcggggtgtgtgtgtgtctgtgtgtgtttgtgtgttgtgtgtctgtgagtgtctgtgtgtgtgtatgtgtgcgcgagggcaagtcgggagggggacccagctcaggactgggaggccctgctcgcaggtccctgggtcccggtggcggccggagcgcttgctccgcaggcagcgggcgggtggtcgcccctcccgcccccaccccgcgcgtgcgcgccccggcctctccctccccgccaccctcctcggctcccgcgcggcggcggcggttcctctcccactccccccagccctggctccgggggaccccgcgatgccggtccgcaccgagtgtcccccgccggccggtgcctccgctgcctccgcggcctcactcatcccgccgccgcccatcaacacccagcagcccggcgtggccaccagcctgctctacagcggctccaagttccgcggccaccagaagagcaaggggaactcgtacgacgtagaggtggtgctgcaggtgagcgccgggccgggccggggcccgagggcctcctcgcggcgctcacgggccgtgcccgcttcggctcctcgaccccgcagccgcggaacaggccctcgccgccggggcctcctgcacccggcgcttcccacccgggaccttcccagcctgtgtctcacactctccgagccccagccctgacctgccccttcggacccagagcccgtcgtgaccggctcctggcggaccccgaacactcccagacttgaagcccgtgaccggcccgtctgggatccggaagcccctcatgactcggagaaggcctgggtccttcctccccatgacctgtcgtccctagatcagggactgccaccagcccttttcagaccctgaagaactctccattggtttcaccagacttgggaccctccccatgtctgggcccacgtcagattctctcagacctgagacatgtcctcctgccccttcctcagttccaggaatccgcagaccttggggtcttcctcctcctgagatctccttaggagggcttcatcagacccccagacgggggagcacctaacccgcaactgattggtcaggccctggcctcacctcaagaccaggcactcactccctgagtgctgctcacagtctgttgggatgttgcctcctgggtcccctgttccactcactgcttctgtctcttcatggtccaggcacccagctccttccagcttctccacccccaggcctcctgcccctgctctgggaccatttgcagtcttttcccagtcttcctggcctctatccagacttccccaccccataccttcgtcttgctcgatcctggttccaggggaccctctttcctgttcttaacttttctctacacaggcacagggcttcctcttagtctctggtacccatgtactgggaaatctaactcacccaattttagttcatgtccagtcgcctccccccatttgacctggattcctgaatacctgctgccagtccctgatcagcttcggaagtacagcttcacttgtctgggcctttcccacacctcactcctctcaggcttgacactttttgccagctgaaatggagtggcagtggtgaatactcttttatctcccctccccacaaaactcttcctcctctatacctacccctgcctgactaaggacccctttccccttccctttgccctttttttccttagtctgacacctcatctgccaggctgttcccagaagcccctccaaacacctgtccctctgaaaggcactgtgtgctgccccactgcctcccccccgccccaccccccggggtgtgagggtggaatgtacagtatatttattcctcaagctctccttttggtcatttaaaacaaatcttagtttcacttctgaagagtaggtctcccatccaaaagacaatgagggtgccttttctttctgctaactgcggagcactcatcactcttttattctcatactgctttgtgggaataaatcattttctctgcttacttgaaacagcatcgtcatgttaatcatatctttgggctgtaaagttctatcatgagccacgatagttattataatggaaatacgattgtggctgaaatatttttgtcttcataactgtatgcctaatgtagtgatcctcttcttaaaatgtgagagtcgagtatgaaggtacaggggtttttcggtttgttttgcacctagtcatagaattctggaggtgagatccctgggtgggtcacgtttgggatgatcttggatttgtccctgttgttcagtttgatggtttctgatgtagtaggggacaattggcaagatagccaggcgtcaaaggggagtctgctttggctactgcagcaactgctgctcccttctgtcattagggtatcacttctgagctcctttcagaaggagaatcatgaaccaggggaagcagtggttgagttggggcagggctgataggtctcaggcagcccagagcagaaacctggtggatggctgggagccacttgagtaagatgtctgatggtgggggtggtggtcatgccaatgaatgctgccctacatctggattggtgagctgcttggtcatcatcacgactagtcagtggcatgtgaattgccccatcatctggtttttcagccaggactagtttgtcagacacagccttcttagacttaaaatacttctgccttttataactcagcttctttttgtttgttttgttttgttttctttctttctttttgtatctttatttagatagaattcacttatttaaggtgtacaattcaatagtttttagtatattcacagttgtttaaccaccaccacaacctaattttagaatattttcatcaccccaaaaggaaaccttgtatgtaacccttagccataacccccactccaatcctaggcaactgctcatctatttttgttgttgtttgtctattctggacatttcatataatcacatagtatttgtccttttgagattggcttccttcacttagcataatgtcctcaaggttcatccatatggtaatatgtatcagcacttatattcctttttattttgcattgttcattgtaacaattgtccattgaatggatatacaacattttgtttatacagtgatcagttgatggacatttgggttgtttccacttctggctactatgaataatactgctatgaacatttatgtacaagtttttatgtggatgtatatttcactttggtagataactacctgggagtgcaattgctgggtcacatggtaactgggttttaacattttgagaaactggccctgcattgttttacatttccaccagcagtgggtgagggttccagtttctccacatccccgccaacactcactgttcatcttttttgttgtagccatcctagtgtttttgaagtggtctctcactgtagtcttgatttgaatttctataatgactgtgctgttgtgcatcttttcttgtgtttttgttgttgttgttgttttggagtactttcttttctgtgattctagtgtaaagagttcctcaaacctttgtgagtttctgactgggtctcctctccaccccgcacttactgtgactcctctttcctcctctgccatctaagaagccagcagtagaagggagccctggtcgctgtgaaaggaatatttaaaagaacagccgttggacacagctgtgctgtgacaccttcttgctaaacacgtgccctgttatctttcttgagatgctcgcctgccgtttggtaaaagctgtatgcgttgtggtgtatttgagttcaccaaccattatcaagatcaatttgggcagagtagagagacgcttggttgaatggaggccaagctgaaattctgattcttgagcatgtgataatccatgcaaaatgttagccaatttacatttcaatttttaatcttattagcaagtatccttgccacctgatacacttttcagcagctgtgaaactccaaactatattgaattcaatgagaattgcatacatgaaatttaaagactcaggttagaattatgtgtcctttaataaaagttctttgctgaaccatgttagcgtggattagctgttttagataatgtccagtgccaaggtcagcagatgaggatatttaaaatgctttggcagttttcacagggaatacctttgtcaccagcaccaaactgtgaaggcactttggcttcattgaagttcatttgctttggtgctgacatcatctggttgactaagttcattacagtttttaagcatggcttagtatttgatttatggtataattggaagtaatcaggttcacaaatctgataaatgccacaaaactattctaatttcttgaaataagacctcacttaacattaaaatctcagtgtaccacaggtacccttgtacttggtttgctttaattcaaggatttaccttgtaagtgaatccaattgtcatgaaatctgaaactccctattcagaatgagtctgtatagatttgggtgaaatctcacatcaggaggatttttgaggtgacgtggcttcaggttggttaattcagaggcctacgatgggcccagttttttccatctttctaactaccatcctcagcatttcctggcctgtttctcccctgtggtctagatgtctcccccaggactggacactccatgcggatactgtcaccactaggggacaaaaaagccatttcttcctcatgcgcctcttcaaaagccagggatttttcacagatgcactcaggagacttacacatctgatgagccagaaatgggtcactcacccctaaatacatgacttgcaaggggatagggacacctgtgtgccttagatccatcaggttgaccaagtcttacgtggtaggtaggtaccagagcaaaaactggaccctgccagcgtgaaaaaggaggaaattgtttgttgggtaggcatccggcagtgtctcagcaaccagtaattggtgactgctaaacctcaaagtctactatgcctgttatttctatttattttaggctcctgactcttttcattaagaaacacagcatccatatataaaatgcacagagtgaacattcacaatatagtcagacttttggttggcattttggttcataactgaagtttataccacataaatctttataagatgccatttctgaacagtctgcccatttcataaagagataatgcaggatgatgtttagtgtaaaaactagaagaggagcagacctcctagaccaatgattgagcaatacagaaatagaaaaaggcttgaaagacattagaaagaaagtcaagcctgaggttagggatgacaccacgtgtacaggcagagacagaggccctgtgcccagcaatgctcaaggtctctagatgaccgggagacgtgtgttgaagatagtacagaaaatgaatttgagtgggcaccccatttcagaaagacacttcagtctcatgatattcagctgaagaaagttgagagggtcttgggatcagtttgctttggcagaacaggcatgtgtgtggggagaacttatcaagattccagagactgggtgagccttggactgccctgggtgttcactgaccaccagtctggcctcacaggatttgcagagtaccctcctgcatgtcccctagtaagtttatctatttgtgacaggctgtgtatcctttcttttcagcacgtggacacggggaactcttacctttgtgggtacttgaagattaaaggccttactgaggtaagcacttgctcacacaaaccagcactagaaagtctgtggtgtgctccacaggctcattggggttcagggcaggcggtctcaactccttgaggcctaattaaagcagactactcctgagcattgctactgtatagggaacataaaacaggcagtttcagtgtgtcctgttgagaagtgtacagattcacaaatgttttaaagaaaagtttataagtacatcataattgtcacaaccaacactattgattttatttttaatcctttttgggggaaaaaataataagaatatagctgccaccctcatcataagtttaacagtttctgagataagcatcagtcctataaaaaatgagcttttaagttctttaagcctcttagttaattggaacaatgaaaagttactgactggtcgcggtggctcatgcctgtaatcgcaacactttgggagcctgaggtgtgcagatcacttgaggtagggagaccagcctggccaacatggtgaaaccccatctctactaaacataaaaaaaaaaaattagccgggcatggtggcacagacctgtagttccaggtacttgggagtctgaggcacagagaatcacttgaaccagagaggcagaggttgcagtgagccaagatcaccatgcactccaacctgggcaacagagcaagaccctgtctcaaaaaaaaaaaaaaagaaagaaaaaaaaggggaagtgaccatctagtttccagcagaagtacctgctgtgcagagtattttattttctttgaaccaagtttttaaacctcagaactcctgggactttagaaagcaaggaggagcatcctttcttttccattagcaaggaaacaggaagtggaaggaggtagctggactggccctccgaatgctgggaatgcccaggctggacctagctgcagggggcctctggcctttgtcagctctcatggtctgatgatccagcagtatttggacagagtgctgtgctggatggggcagtggaaaggagctggggtggcattcttcttctgccccttcctgcatctgtgacctttaacttctttcagtgtcctcatctgcgaagttgagaattaaaaattcctgctccaggctgggtgctgtggctcacacctgtaatcccaacattttgggaggtcaaagcaggaggatcacttggggccaggaattcaagaccagcctggacagcatagcaagaccttgtcgctacaaataatttttaataaattagccaggcatggtgttgtgtgcctgtagtcctagctactcagaagactgaggctggagtatcgcttgaggctaggatttgaaggcagcaatgtgctgtgatcatgcctgtgaatagccactgcactccagcctgggcaacctaggaagatcctctctctttaaaaaaaaaaaaaattggggtcgggcgtggtggctcacacctgtaatcccagcactttgggaggctgaggtggatggatcacctgaggtcaggagttcaagaccagcctggtcaacatggtgaaaccccatctttactaaaaatataaaaattagctgggcatgttggcaggcacctgtaattccagctactcaggaggctgaggcaggaggatcgcttgaacccgggaggcggaggttgcagtgagccaagattgcaccattgcgctccagcctgagcaacaagagcgaaactttgtctcaaaaaaaaaaaaaaaaaaaaaaatccctgctctgtctaagacaatcagtggacttgttctgggggtaaggaaagaatgttagagaaaatgacagactcaaatatggtactaatatgtgattctcttgtaaagtcctgatgagcctcagtcttaagacaagtttctggctcctggttcctatctgcttttctattagaagcttaactgattaaggatctcctatgaagtttgttgttgagaccaaaggtatttcttctttaactcgagaattgtatcaaatcaagtaggagtagaagtgatagcaaaatacaggattccagcctttgggtttgtggtaggagaaaagatactaaaacagaatatgctcaactctcaggtagccaaatacattagttaactgggtgcagaacataaacactgaatttcataaggaaaccagcaagtgtgtaaggcattggaatgttaacgctgactccaaaaccagtcatttgggtgataacaagctgcacagaaatggtaagtagcattcgaaatcttgaagaagtatacagaaatgctaatggcattgagctctccatcgggaacaagtagcccttcctttaggaagcccccgtgagtcgagagcagcagtcaggctcctttgaggagggggcactgacaatggcccttcaatgggggctaacccaaggggagccctaggctcttaacagaacctctgcagatggcgtggcctcgatgagcacataccctccccagagttgcctgttcctggtccagcaataaatagaccacgttatgctgctgcaggggtgttgcgttaaagcaagtcctgctcaggccttagatgtagaagaattctttttaaataatgttttttagtagctttattgagataattcacataccatacatttcacccatttgaagtatacagttcattggtttttagtgtattcacaaagttgtgcaactatgtgataacttttttttttttttgagatggagtctcgctcagtcacccaggctggagtgcagtggtgcaatctcggctcactgcaagctccgcctcctgggttcacgccattctcctgcctcagcctcccgagtagctgggactacaggtgcccgccaccacacccggctaatttttttgtatttttagtagagatggggtttcaccgtgttagccaggatggtctcgatctcctgacctcatgatccgcctgtctcggcctcccatagcgctgggattacatgtgtgagccaccacgcctggccgataactttttttttttgagacagagtctcagtcacccaggctggagtgcagtggtgtgatctcaccttaccacaacctctgcctcccaagttcaagcgattctcctgcctcagcctcccgagtagctgggattacaggcgtgcgccaccctgcccaactaacttttatttttagtagagacagggtttcgccatgttggccagactggtctcgaactcctgacctcaaatgtccaccctccttggcctcccaaagtgttgggattacaggcgtgagccaacgcacccagcctgataacttttaaaattataagtctagtatatggttgccgtagataatagtaaaatgcagaaaactacaatgaatctttgaataaattttgtacctgtatttgggttttttttcttttccatttatgtttgttaaaatatcaattttttatttttattttttgtttttgaggaagagtcttgctctgtcacccgggctggagtgcagttgtgtgatctcagctcactgcaacttccacctcccaggttcaagcaattcccatgcctcagcctcccgagtagctggaattacaggcatgtgccaccacacctggctaatttttatatttttagtagaaatggggttttaccatgttggccaggctggtcttgaactcctgacctcagatgaaccacccaccttggcctcccaaagtgctgggactacaagcatgagccaccgtgcctggcaaaaatatcaaatttttaatttattttaattaaactataatttgggttttagtcatagtagttgccttcctcacgtatacagtatggaaaagtatctactaaaatggagataggccaggcacagtggctcatgcctgtaatcccagcactttgggaggctgaggcagctggatcgcctgaggtcaggagtttgagaccagcttggacaacatggtgaaaccccatctctactaaaaatacaaaaattagctggacatggtggcgggcacctgtaatcccagctactcaggaggctgaggcaagagaatcgcttgaacccaggaggcagagtttgtggtgagttcagatcatgccactggactccaacctcggcaacagagtgagacttcgtgtcaaaaaaaaaaaaaaaaggagataagtgtcaaaaaaaaaaaaaaggagctaaatggcctcttagctacctcacattcacaaacaagcacagcttttttgtttgtttgttttaatttttattttaggcttgggtgtacatgcgcaggtttgatctatagataaacttatgtcacggtttacctatgtaactgttgtggagattattttgtcacccaggtattaagcctagtactgaatagttatttcttctgctcctctcccttctcctaccctctaccctcaagtaggccccattgtctgttcttcccttctttttttttttgagatgaagtctcgctctgttgcccaggcttgagtgcagtggtgcaatatctgctcactgcaacctctgcctcccaggttcaagcagttctcctgctcagcttcccaggtagcatgtaccaccacaccaggctaaatttttttttgtacttttggtagagatggggtttcaccatgttggctaggctggtcttgaactcttgacctcaggtgatttgcctgcctcagcctcccaaagtgctgggattacaggcttgagcctattgtttccttctttgagcccatgagttctcatcatttagctcctacttataagggcagtatttggttttctgttcctgcattagtttgctaaggataacggcctctagctctacccgtgttcacgcaaaagacatgatctcatttctttttatggcttcatagtattccttggtgtatatataccacgttttctttatccaatctgtcattgatgggcatttaggttgacccactttttactattgtgaatagtgctacagtgaacatttgcatgcatgtatctttatagtagaatgatttatactcctctgggtgtatacccaataatgggattgctgggtcgaatgatagttctgtttttaactctttgaggaattgccacattgcaaaacggagctttaaagtttgttttcatgccttctggaagtgaaattctagaaatgtaaagaataaatatgaaataacattctttttgcacttttgagccatccgtcagtcaagagaggcgacctttccggggaacccagcagctttcaggggttacctgggagcccagcctttgggggccatgggcaggccccccacttactcattacttgggtttggaagggttggaagctccagctgaagttgtgctagacttgtgcttaactagggagacaggtcacacctaccaaaactcacaaaaacaaaagtgccagtttttgtcagagaatgagattcctgtatgttccagaagttcctgttgacttattggccaattgaatgttaatcctccagaagacaggtctacatggaaagtcgtggtacctatcaccacacagttttgggtgagcctggaatcagtgggaggattagttgggggacttaaatgtctgacaacagccagacccaccaagggatgcccactcctgcttttgctgcctctgttattcatttctcgatatcctttcttctgacatggtttttcgtccgctctataaattacccctcattgggctgtaataaagtgcttgaatttcctgttcctgctctgagaatattttatcttttcagtgacttctgtacacactgaatctcatttattaggtatttattttatttaattctcaaagtttgagggtaccctgtagttaccctgatatactgcctaaagtatgtttacaaagaagtcaatgcagaattattcattaagaaaactagtgatttaaaccataagtgttttaatcatattaggacctcctccccacccctcccttttttaaaaatagagaccgggtcttactatgttgcccaagctgatcttgatctcctaggctcaagtgatcctcctgtcttggccccctagagtgctggcattacaggtgtgagccaccaggcttggccttgtattaaaacctctttatcatttcatcctatccctttcaaggaagttcagaaaaaagattaaagcttgaaactcggaaaaataatataaacagtttgtagttggctgatgcctgtaatcccagcactttgggaggccgaggcaggtggatcacgaggttaggagttcaagaccagcctggccaagatggtgaaacccgtctctactgaaaatacaaaaattagccacacgtggtggtggatacctgtaatcccagctactcgggaggctgagacagagaattgcttgaacccgggaggcggaggttgcagtgagccaaggttgtaccactgcacaccagcctgggcgacagagcgagactccatctcaaaaaaaaaaaaaatagcttctagtttaaaatctcaaatgcaggtgctgatttattgagaacttttttccttagtagtctttcctagaacagattataattaaaagttagtttataccggctgggtgcggtggctcacgcctgtaatcccagcactttgggaggccgaggcgggtggatcatgaggtcaggagatcaagaccgtcctggctaacaccatgaaaccctgtctctactaaaaatacaaaaaattagacaggcgtggtggcatgcatctgtaatcccagctacttgggaggctgaggcaggagaatcacctgaacccgggaggcagaggttgcagtgagccgagatcgtgccactgcattccggtctgggcgacagagcaagactctgtccctccccccaaaaaaaaaaaaaaaagttagcttataccttaaaaattaggtttacatttaggaaaatttctcctctctcattttttcagtctatgtatttaaatatttatgtgaagaatccagcaacagtgttaggataggggggttgtgggtttggggcagtattagatttatcatattttaagttcactgttaaggaaacagatcccctccatggtgtcatcctaaagcaggcctcctgagccacctgcagcggtggtgacgttctgtttcctgggagcctctgcaccagtggcttttactgtggcagcctctctcaggaaggtcctacactacatgcaggccaggttggtagatgtggcaaagccatcagaatgaggtttttgatgcagaataagaggggcttacatctgatctgaaggaaaaacgtgggccttctgcagtccttgatgttaggactgtaatctgtggttttccaggccagtgactctcataaccatgctcctggcagacaccaggggcttggcaaggtagcctgagaggtgggtgcttggttggtttctacaaatgcagagaaatgtagactttttacggtgttaactttttgtcttattaatcttttttaaaatcattggtgcctacttattaacacatgaacaaagagcaattaacaaagcacccaagccagcacatggcttcttgcttacgttttccacggtgtggtttttacattcagacatgatttacatatgtttttcctcatataaattgtttttagttcatatgtttttcctcatataagttgttcttagttcatgtgacagaattaaacgtatccctatgtatcaaggtattctaagactaccttcagggaccatttgtatagttcattactagaagtttctctgaacatgtagaacactgaaaaaagtatttactttttttttttttttttttttttgagacagagtttcactcttattgcccaggctggagtgcaatggcgtgatctcggcttactgcaaactccgcctccaggttcaagcaatctcctgcctcagcctcccgagtaggtgggattacaggcatgcgccaccacgcccggctaattttgtatttttagtagagatgaggtttctccatgttggtcaggttggtcttgaactcctgacctcaggtgatcctcccacctcggcctcccaaagtgctgggattacaggcgtgagccaccatgcctggccaaaataaaaggtattttaggctgggtgcggtggctcacacctgtaatcctcgcactttgggaggccaaggcgggtggatcacctgaggtcaggagttcgagaccagcctggccaacatggcgaaaccccgtctctactaaaaatacaaacattaggtgggcgtggtggcagccaactgtaatcccaactactcgggaggctgaggtaggagaatcacataaacccagggtgtgggaggaggttgcagtgaaccgaaattgtgccattgcactccagcctgggcgacagagcaagactctgtctcaggaaaaataaaaaagtattctaccccagaatccaccctggaaccttggagaattggtgtaaaagggacaaatgactgagccagttggagaaccagtggcttgagggagccttagtggtagacacagtgattttggagcctctttgggtctaaccttggaaagtaaaatctaccaagttatgatctgctttgtatgctagaatattaaaaatttatttgtggaaacatccaaattattttctaagagactagcatgtaacaattgaagtcaaagaagggctgtctgctgctggcaaaatccaggaaacccttcattctctgggtgatttagattcaggtccattgccacagcctgttggcaaactggctgcgatctaactctggtttggattgtcaggtagcagtgtctaggtactggaaagaagttaaagcaaagtttatttttcctttgtacaaaggttaaaaactctcactcaacatcttattttgatatttgggtttttaccataggagtatccaacccttacaaccttcttcgaaggagaaataatcagcaaaaaacaccctttcttaactcgcaagtgggatgcagatgaagatgttgatcggaaacactgggtgagtaaatctgatctgtgctgggtcatctaggggctgctagagaattgaagaaatgctgggagccagagaccttgtcccttattgaggattactggggctttgcaaccaagtaaaaggttgcactgcacacagacctcagttgttccatcttccttatgaggacagtttaaatacgatctgacctgctgcttaaatagcaaatggttgtctgatgatagcaaccccagagttccagccagaactctgctcagctatcagaatcttaacagtgtccccccatccttcccacctgtttgtccatcttctgtccactgttcctttcaaatcacctctgcttggggaaaaccctgtgaaacatgcaatgatgacctccggcttcggggctggcatgagatggagatgatgttgtgggaatctgcctgcccactggcttatcagggcagagccacatcatttctttttatcctggctgctgacagacaagtatagtcttgtcttaagtacaccactataaatcctgctgcccccctttttaactgtcaagtgtagagcattctcactcagcagtagtgaatgcttcaagacagttagtgtcctgggatcttttcatttgttgtcatataagtaccatgtcttcaaaaatcagtgtctcggctgggcgcgttggcttgcgcctgtaatcccagcactttgggaggccgaggcgggcggatcaccaggtcaggagattgagaccatcctggctaacacggtgaaacctcgtctctaccaaaaatacaaaaaattagctgggcgtggtggtgggcacccgtagtcccagctactctggaggctgaggcaggagaatggcgtgaacccaggaggcggagcttgcagtgagccgagattgtgccactgcgctccagcctgagcaacagagtgagactccgtctcaaaaaaaaaaaaaaaaaaatcattttctcaacctaatagccttttgctttagttgaccatggtgatggtgaatttttgtttaacattgaagaagttcaatgggtttaccctccataaaccaaccagaaatggctgtgtcagtagcaaagattctagaactcgttcttcccattgcctctcacacctggctatctaaactctcccctggttctggcacagcagtctgtggagagaactcccgcagacccttgtcttgagttcacctcactagagatcagttgctttgcttactaatgttttttatttgtttattttatttaaaaaaaattttttttagagttggggtcttgctctgtcgtctatgctggagtgcagtggcatgattatagctcactatagcctcaacctcctgggctcaagtaatcctcccacctccgcgccccaagtagctagaactacaggcacgtgccaccacactgagctcattttcttttatttttgtagagacagagtctccctatgttacccaggctggtcttgaactcatgatcttaagtgatcctcttgccttgtcctcccaaagtgctgggattataggtgtgagccactgacccaacctgtttttttggtttttcttttatgggggtttttgttttgttttgttctgttttgtttggtttggttttgagacagagtctcagtctgtcacccaggctggagtgcagtggcgtaatctcggctcactgcaacctctgctcactgcaacctccgcctcccagattcaagtgattctcatctctcagcctctcaagtagctgggattacagacgtgcaccaccgtgcctggctaatttttgtatttttagtagagacaaggtttcgccatgttggccaggctggtcttgaactccaggcctcaagtaatcctcctgccttggcctcccaaagtgctgggattacaggcgtgagccaccatgcccagccccaagctgttttttacttgagtaaaaaaaggagatctatcaaatactgaggttcagttaaatttaaatttaaacttgagctttttaaagcgttttttgaattctatacattttgattgttgtagcaaatggacactaaaaactagacagtcatttgtgtctctctgtgatacaagagaatgcacaagacctgagtatccagaaggttgggggagcccaagtggtgtatgaaggtgctggccaccagcaggtggagttggaagggctccctagtaccatctgcgcccacccctgcccagggctaggctcttcctgcatggcttgctgcctcacgagatggctccttcctctcctgtacagtcccagagtagaaggttcttccttgtagtaaaccacagcctctctcccattcaactctattttccatttcatattggtcctgcaaaaagcaaagtctttgaggcccagtgacactcagttttaggctaggttgactacaaattaaatacttggaaagcaactcttaattttcccattgacttccgttagaacattggaagatatctggatctgcagactctgctagactggactgaaacattttgggtgagagaggaactaagaaggccacccttggtactggcatgtgaggtgtggttgagccagggagctgaacctatggagtgcttcctcctccaacagtttgtggctgcttttgtagtactcagcatttcccctaactttcaccactcatggaggactcccaggttcccacgtgggactcctggagctctgtactgcacctgggtttgtctgagatttacaatgtctaatacacttcacctaggctgtcattttttcattataaactagaatcagagatattgtattgcatcctcagattttcctgagtggtatttaagttgctattatagtggtactataaagtcaggattccatatattcagtctacataggataaaaatgtctatgtgacaccaggtgtggtggctcatgcctgtaatgccagcactttgggaggccgaggcagatggatcacctgaggtcaggagttcgagaacagcctggccaacatggtgaaaccccatctctaccaaaaatataaaaattaaccaggcatggtggcacacacctgtaatcccagctattcgggaggctgaggcaggagagtcacttgaacctgggaggcggagattgcagtgagctgagatcatgccattgcactccagcctgagcaacaagagcaagactttgtctcaaaaaataataataaaataaatctatgtgacaaaatctatgacttaatatctctgtgtcttgattttttatttaagatgttttcttatcaaattaacacatgcttgtttaaaaatatttgaaaaaatagaaaagctggaggaaaaggagtcatctatggcaacacctaaaactaaaatagctgttaacctcttcctgaatctcttttgggtatacagtgtatacttgttttttgtcttttttttaaaaaatgggatcataaaatacagttttgtaacctattcctaatctcctgttgtaaatgtagtcagccctccatatatgtgggttctgtatctgtggattcaaccagccacagtttgaaaatatttgaaaaaaaaaattgcatctgtactgatgatgtatagattttttttttttgagacagagtctcgctctgttgcccatgctggagtgcagtggcacgatctcggctcattgcaagctccgcctcccgggttcacgccattctcctcctcagcctcccaagtagctgggactacaggcgaccaccaccacacccaactaattttttcatatttttagtagagacagggtttcatcgtgttagccaggatggtcttgatctcctgaccttgtgatctgcctgccttggcctccccaagtgctgggattacaggcgtgagcccccacacccagtggatgtatagattttttgttcttgatatttttccctgaacgatacagtataaccactattcacttagtatttacattgaattaggtattataagcaatctagagatgctataaagtataggggaggatgtgtgtaggttatctgcaaatactgcactgttttatatctgggacttaagcatctgcagattttggtattcatgggggtcctggaaccaatctctcgcagatatcgaaggacaaggctatcatgtgtttctagtgtctgcttagctagctggcccaagcccctagatcatgcagagacacaagcttcacaaagccctcttctctgagactgggcaggctgtttctaagctgttttgcatggctctttttgctacttcggatttacttgcagaggtcttctcattaatttttcttagctttcgtctgtttattttgtctgtctgttcaccattcccatcctttggccttttcctcagccatgttaacaaggcaggtgtagggcagtggggccccagctggagtccaggtatctgccccagggttgagtctgcattcaatggggtgaccatagggccccatctgttacttggtcttagctgcccttttgggagccacgtccctagctgtcatgccttgggaaggtgagtttacctgggcacataagcatagttctgagagcagcctctccttctctcagtcaatcggcacactctcttttctgctttcagggcaagtttctggctttttatcagtatgcaaaatcatttaactcagatgactttgattatgaagagctgaagaatggagactacgtcttcatgaggtggaaggtaagttcccaccaggtggccctccagactcccagcaagccaggccctgtatcgcacctacatattcactctaaccaagggctccccatgtccagtgctcgtcacagctggttgtcatggcaaagtcttcatggcagggtctttgcacgcctataaaaagtgggcccagctccagggcacgcactggttaactgccgatgtcccagacagctcctcctcgctgtgcttttggtgggtagcaagtggatttgggcctaggtggctgcctctaacattgtcttctccctttcctttctcccacccaagaatcttgttgaacccccaagttgaatcactccaagtgttctgtggattcaaggcagagccaaacttgctttgaacttagtcatcagttgtacccagatccctctacaggcttaaacaccatccgtgggccaggtgccctccaccacatccttttcccagagctcaggaaagtctcacctcctctacttccctccagctcaggaaatgagggaccgggaatggaacacgggtttttgactcagcagacctcagagagccccacctgactgacttgatggattggcttttagctgcgaggtcatttgtgctccctgctttgataacgtgatatttacagccccagaatagcaaaatcaggaagccagtttgttaaataactttgagaacataccaacccctagtccccagtctgcagggaaaaagtcgttttatcttgaaatcttgtcagctttcataaagatgaatcatattgagttgcctttcctggtctttattttgcatagctaaccactttaggaagtggggatcggccgggcgtggtggatcacacctgtaatcccagcactttgggaggctgaagcaggcagatcatgaggtcaagagattgagaccatcctggccaacatggtgaaaacccatctctactaaaaaatacaaaaaattagccgggcatgttggcatgcccctgtagtcgcagctactcaggaggctaaggcaggggaatcacttgaacctgggagatggaagttgcagtgagctgagatcacgccactgcactccagcctggcgacagagcaagactccatctcaaaaaaaaaaaaaaaaaaaaaagaaatggggatcactgggcgcggtggctcatgcctgtaatcccagcactttgggaggccaagagagccagatcacgaggtcaggagttcgagaccagcctggccaatgtggtgaaaccccgtctttactaaaaatacaaaaattagccaggtgtagtggtgcacgcctgtaatcccagctactcgggaggctgaggcaggagaatcacttgaacccaggaggtggaggttgcagtgagccaagattgcgctactgcactccaggctgggtgacagagcaagactctgtctcaccaaaaaaaaaaaaaaaaaaaaaaagaagtggggatcaccactcttccagtaggttgccagatgcagagagtaaacagggaacagtatgctcacgagcttgccatctagcgggaaacatgtcaactaaacaacctgttaaaggaagtttattgtttgaattttgtttgttttgagacggaatctcactctgttgcccaggctggagtgcagtggcacagtcttggctcactgcaacctccgtctcccaggttcaagcaagtctcctgcctccgcctcctgagtaactgggactacaagcgcgtaccaccacgcctggctaatttttgggtttttttgtttgtttgtttgttttttgagacagtctcactctgttgcccaggctggagtgcaatggcgcgatctcggttctctgcaacctccccgtcccgtgttcaagcaattctcctgcctcagcctcccaagtagctgggattacaggtgcccgccaacatgccctgctaattttttgtatttttagtagagacgggttttcgccatattggccaggctggtctcaaactcctgacctcaggtgatccacccacctcagcctcccaaagtgttgggattgcaggcataagccaccacacccgatctgaattttaaaattaattttaaaagccacaattttagaagttgaataaggaatgggagggtgtcttaaatttgtttaaaaagcaatgggcttgttttgcctccaaagaatgtctcagagtggctcatctgtggtcctttagtagaccacctgaggccctggagcttctgacctcatctctctgggaaagtaggtgccaggacctgggtttccagctttcagctccagcagaggtggcaagcttgcctctctcctaaggtccctggtaaagaacagtaccgttctgactgcttttgacaaggcgtcaagctcttggagggggtgtcacaggggctactggcaactgctttgcactcagaatggtccacagacctacagaagcgactcactgttctagatgttatcaagcatctgttgacagttctgagaactggagcagaaacttcgctcttcccaggttgattgtctgtggtctctgaaagatagagaggcaggcagacaggcaggtgagtaggtattgatttatatattagatgtttcggccatggtaccttctctgaattgctgatcctagtgagctcaagacacagtttgtcactttagtatatagaatactccaggagcacatggacgctttttagaagtcaggctgagaccccacgggcccgccatcacccagcaagtctaggttagactatgagatcctatatttttctcgagtggtccttagaaccccctgatgcttaacagggaggccccgtgggtggtcagagaatgctatctgttactgaccctcttcatctgtgtgcaggaacagtttctggtcccagatcacacgatcaaagacatcagtggtgcttcttttgccgggttctactacatctgctttcagaagtcagcagcctccatagagggctactactaccataggagttcagaatggtgaggacctctgaggacagaggccacggggagggcttgctgcccagctggctctcccttggctcatcaaacccaaaagcaacatcttagcctgtctctgtatagattctgtgctttatttggatgctgagagcttatttcagtgatctcagttgctcacaataaggccttatccctatgcacagagcagagtaaatgagatgaaaatgaattataggtgaaagaactcatttctaagcacttttaagcaatactgtatttttggcaatgtttatctcaatcttgctggtttttatttaatccttgcaaattgaattagtaactaaaatgtgaattgatccagtactggacaatgtgaattttgctgtcagcagctttttaaattttgtggctgcattccttagagttggtccgacatgcacttgatttaaggctcatgacctgggggcctgtgagtggacagtcctgtccagtgtgtcaccaatagtaaaggactgaactctgcctgaatgctaacttttgccaccttttgagggattctcctgcctccttgctgctttttaagcaccttgctgtccccggagggcaaaccatgtgataaaatgcctgatttcctctctgaaggtaaaaattctttctttccagtatttaacactttgttatatgtgaagtgatcctaccctagattccttgttcagtggtaacgaaattatatctgcaagtaaatgccagccctgtagccacgatttttaggctttcagtaatggttttcacgcaagtttgtaaaacttttataatcctttttaaaaataacagctggccgggcacagtggctcacgcatgtaatcccagcactttgggaggccgaggcgggtggatcacgaggtcaggagatcgagaccatcctggctaacacggtgaaaccccgtctctactaaaaaacaaaaaattagccaggcatggtgacaggcacctgtagtcccagctactcgggagtctgaggcaggagaatggcgtgaacctgggaggtggagcttgcagggagctgagatcgggccattgcactccagcctgggcgacagagcgagacaccatctcaaaaataaataaataaataaataaataaataaataaataaataaataacagctttggtccgggcacagtagctcacgcctgtaatcccagcactttgggaggccgaggtgggcagatcacgaggtcaggagttcgacaccagcctggccaatatggtgaaaccccgtctctattaaaaatacaaaaattagccaggcgtgctggtacgcacctgtagttccagctactcaggaggctgaggcaggagaatcacttgaacctcggaggcggaggttgcggtgggccgagattgcaccactgcactccagcctgggcgacagagtgagactgcatctcaaaaaaaaagtgtacaagtcagtgatctttcctatattaatagagttgtctaactatcaagtttagaacattttcatcaccataagaggaaaccccatacccttagccattatcccaaactcctcatcccctctgagccctgggcaaccactagtctttctcttatgtatgtatagatttgcctattctgggtattttatataaatggaatctacaaaatacggcccttgcttctggcttttttcacttagcataatgctttgaaggttcattcatgttgtaccatgtatcagaacttcttttttattgccaattaattttccattacaggtatatacaactttttttttgaaacaaagtctcgctcttgtcccccaggctggagttcagtggcacgatctcggctcactgcaacctccgcctcccaggttcaagcaattctcctgcctcagcctcccgagtagctaggattacaggcgcctgccaccacgtctggctaagttttgtatttttagtagagacggggttttgccatgttggccaggcctgtctcgaactcctgacctcaggtgttccacccgcctcggcctcccaaagtgctgggattataggtgtgagccaccgtgcccggccggtatataccacattttatttatccattcattatttagtggacacttagattgcttccattgtttagctcttgtgaataatgctgctgtgaacatgggtatatctgagttcctgctttcaattccttggacatatacctaggagtgaaattgctaggtcatacggtattgctatatttaactttatgaggaactgccaaactgtttcccacagcagctgcaccattttgcattcctaccggcatgtatgagggttccagtttctccacatcctccctggcacttgttatcatgtctctataattatagctaccctagtggatgtgaagcagtatttcattgtagttctaatttgcatatttttgatggctaatgcatatttctttcctgataatttgtttttggtaagaaataagccgctttttcctacgttcttccacactcctgtatgaaacaagtaggggagagccaacttgctagacattgactctaaatgtgcccgaggttgtcatcccagcatgtagattgtctgcccctatttctcctccctctgcatgactccctggatcacctgccaacaggggaggcaaacacctcagatatcactaatgttttccaagcctaataccgtacctaggaaagtgagaaaatttaaatgaaaggtaaaatacagtttaaggcagtagtgaaatgaatttttctacgctctctttagataccatgagaatcagtttatgcctatgctagccataaagttcttaggatatgagagcctggcattacatgctacagcaggagaggtcagagcagccggtgaggttagggcttgggcgtgggtctccatcttctcccacagcttattgaggtctcctttttataaaacataccatagttaacttcatgattagagcagaatgaaaaaaaacattcatctagtgcatggttcaggaggattaaccaaaaaaagaaagaatgaatgaaatcaaactaggttcaacttgagaaatagaaaatgaatgtgcatttcagtccaagtatgtgacttgttgggtgctctgctttttgaggggttactaatgtcctttgctcagggtgcattagatgactacctcccgtttctgtctcctcccccttgcaggtatcagtccctcaatctaacccatgttcctgaacacagtgcacccatctatgaattccggtgacaacggttcagaacagcaaccaaataaaactgaacttggcaaaaaagaactttgccgagaaaattgtgtacctgccagaaccaggagaagtgtgttcctgtttcttcacgagcagactcgcatcacaaagcatgaatgttaacccacagaatccaaggagcatggctggcccgtggggcaggtggagggagcagtcttcgttcttcctcccctcagtggcagtttggtcttcacctgtttttaagctaccttaaacgcacttttccttcctgcacagctaacttctacatcactgaaatgcccattccttcctccgtcccacctccagccgaatagaaggtctgctcccggatcaccctcagccttggtgctcagtggtcccgaggccctagacccccaccccccgccagttgctttgtctggtagctcaagagaaggcagagccccagcacctctgtgccccccagagctctgtgcagggagttggccagctgccgcatcatcggccaccaagggcacaagaggcggaggctccagtccctgctgggctgcctcagtcttcagtgctgattgtgtcacgggtcagcgtgcgctgctgagccctgtactgttaacagtgcaaagctagtgagtagctgtcaggttccctgggcctgccatcagggatcactaaatttaaggcttccagatccctggcaggaacagattccagtcctgcttactcagtacatttgctccaaacttttcaacttgagggcaatactaaacttaaaaataagagtttttttattacaaaattatttttatggtccctttaacgaggaccctatggcaaatgcacaattattcagaattacattttatcgttttcacattgaaaacagcaaatgttgacttagtaatttttatatcgatatctatatgtatatgtatatttaatcaaccagcagttttgaaactagtcatcctggtacaaaagttttgcagcattgcctaaattatagtgctcaacacaagaactgtttttggggccagtttagcatttgtgccgcctccttttgctactcaaaacagcaatgcttggcggcagccttccatgaggcagaaggggtcgtcgttctctgaaaacagtgactctgaaatgttgggacaggggaaggggtgggaaacatgaacatgctcaaataactcgaggctcacgtgccaaagtgtgtgtgtgtgtgtgtgtgtgtgtgtgtgtgtatgatgttttgtttttttaaatgttttaaaagcttaataggttggcatcagttgtagcccacaaacatggctagggctttggggatttggcatttttctggtggtttacaagacttactccgaatacaagaggaaaagctttaaaaacaagattgcatcataacccccaggagcaaagcaacctggaggctgcatatccatgggcgggcagcataagagaatgtgaagcccttcagtgagacgagacgagcaatgggaaaccttttctgttcttaagaagtgactttaattttattgacatatgtactgtatgttactgagattgaatgttaggggaagccttaaggtagaggtatttgggaaagtagccagtgggcacttgtgatatctaaaatctgttatcccaggactgtgtacagaggggcaacctacccattcaggaaggtcagggctttggaaccctaaaaagttggcccgatgacttaaagggaaaaataattcattcccagagatgagtcagaacagtctcctcaatcctgaaattcaacaaggcatcagaagggctggctgtggtcaagcccagctgctgtcatgtgaggagatgctcactgtggtcttgttgagctgatggccttggttgagctgatggacaagtgaaggaggccatggggctgtgctgtccttcctgccgtacgtgccattccactctcttcagctctcccctcaacagcatgcgagcccataccttctgcatttttccaggcctgtgagggatataggcctccccttggagcactgagtccggaggtcatccctgagctcatccacggctcatgctgtggctccgagtagtggtttgagtgggcaggaagggccatttgcaaacactgctgtgttctagacaaacaacccaagtcctatggcaggatttcttccttccttccttttttacccaggtgatgaagtgcacccattgtactgggaagaatgaagaggtgatacctttactagatccttcagacacatctatgagaagatttgttcatttaaaagtctgcccactgaggatagggaaaggattaaggatttttccacctcctcttagtaactcctgaattaccaacatcaacttctttctctccgttcctgaaggaactttggggaatcatcttcatccgtagttacgctttcctgaaccttctcagtggtttacatgcctctgaaactatgtgcaatatttttggttgacacttgtatccatccttaagaaattagtgcagattgcagatgttctgtcttccatcccaaacaagcctgccatgaggtaggatcctaggggtttggctgttcttactccactgctcagaaagcttccattctgctgtcctcagcctcgaccctcttctgtgctggacttccacccacccacccttttcaagtttagatagtgtttcagctgctgtcccaaagtaacaaaacaatacctactgttaagtaggaagtcaatctgtgtgctggttttgttggttatgtggaaatcacaaactccagaggagcaaaggggtttttcaatgtcttttgctttcagaaacagagaatataatattctcactaaggccttgaattgatttttttctcataaaatagtctgataagctaatttttaaaaagaaatgccattaactgtgttgtatcgtggtttaaaattactaacaagttgtgggaaagaaaaataatatttgattttgaatcttaaatgtttttaaaaattagacttgaatgggcacaaagtataaatattttgtttctttatggaggacatgtggaaggagtttgagggtttgggatgggagaagtattttgcagagctatcaatgtccaaataatttaaaaaaaaaaataaaggtatttaagcagtgagtttgtcctatttgtaaaccaaagcagctccattagaggaaagcagtcctctctgggcctgtggctgtggagctctccagggccagccggagacctctgtgtgccagggcaaaccgagggcccctctgggcaactgttgcagtggtctgcttgctcctttttcattctgaatgttttcagctgctcagcacttctattcaagctccattttgttaatttctgtatttcttcagaaatgtggaagcattttttttttccatatgtgaagggtttatatttctatttaacacagagaaaatgtgcaggcagaggtatctgtccaaagcctgctttgtgttctggtgtggggacaggcaatgctgttgggctgctctcgacactgtgactgtggtcctcagagaagatgcctaagtctcaaagcacaggcacttggacccccaaatagcaggatccctaaatcagccattacagtttattctgacaaaccattctgttacgtttcaggtcccacctccctaggaggcttgaaggaacatgactggaaacatgggagattttgaggaaacatataaagtgttgaggtctaaattttaagcaagttgaaatgctaagggaatttacatcagtggcagggcaaagctcccctgttgtgtgtattttctgatctcatattgtctaagcaataataagcttttttctcccatgagatgtggtgtcaataaaagaatagactgttcacagtgctggactcaggatttaagacaccatttatttttatcttttgaggcaagctctctatcaccaggctggagtgcagtggtgctatcacagctcactgcagactcccaggctcaggtgatcctcttgcatcagcctcccaagtagctggcaccacaggcatgcgaccacgcccacctaattttttttatttctgtaaagatggggtctccctatgttgcccaggctggtcttaacctcctgggctcaagctgtccacccacctcagcttcccaaagtgctgggattacaggtgtgagccaccacacccagccaagacaccatttattggctgttttgttgaatggaaaagtcatgggaggcctgggttccacctatcaaccttgggtcccaatctgccctcaaggtacatcagctaacctccctgagcccaacttccctcacccagaaagtggaaaacctctgtctggactaaagaattgttgaggattctagaagatgctcctgaaagcacattgtaaattgaataagaataattgtaaattgaataacatgtaaaaagttattcttgcttaataataatataaaaatatctactgggccagggtgcggtggctcatgccagtaatcccagcactttgggaggctgaggtgggaggatcacttgaggtcaggagttcgagaccagcctagccaacatggtgaaaccccatttctactaaaaatacaaaaactagccgggcatggtggcgggtgcctgtagtcccagctaccaggaagctgaggcaggagaatcacttgaaccagggaggcagaggttgcagtgagccaaggtcgtgccactgcactccagcctgagtggcagaatgagattccatctcaaaaaaatataaataaataaaaagtatctactgagccttgccacatgcaccattgtaggtattgagggtgatgcaggaataaaacatgtctacaacagctatagcaactctctttcatatctcgattcttagatccccaatttataacctttagttagctttgtttttaggccatctataggaactgtagaaatagtagaaattgtgtagattttaagtgtgaaaccaattgcaaaacaggacaaaaggaaaactataagaatgctgtcggctgggcgcggtggctcacgcctgtaattccagcactttgggaggccaaggtgggcggatcacaaggtcaggagatcaagactcatcctggctaacacggtgaaaccccgtctctactaaaaatacaaaaagttagctgggcgtggtggcaggcccctgtagtcccagctactcaggagaccgaggcaggagaatggcgtgaacccgggaggcggagcttgcagtgagccgagatagcgccactgcactccagcctgggcgatagtgcaaagactccatctcaaaaaaaacaacaacaaaaaaagtgctatctccactcatctgaactgcacctgggaagggaagcattaaaattgctcagtaatgaaataggcagtaggctttgatatatttaaaaataaaaattaaaaaaaaaagcctcaaagttggattgcagttgaacagcttttccctccagatttttcttccaaaacatcgaaagattgaaactccctatttgtacatagcagggaaaacatgtaaggcttttcatttgtagagaaacatatgctggattcaagtttatttttgccatttttttccttctgatttttcagttcgcttcatttttcaatgcattagtcatggtttctctccataatcgctccacagcccctccatcttcatgccttctcactggcttgacctggagcagtgtttctgaaacctggctgcacttcagaagcacatgggagctgatttaatgtcaggcagcatgcagaccagtcctcacaacctgtcgatgtttttaaagctccccgggtgactccaacgcacaggaagctttgagcgtaactaagtgagcctcccgccctgaaatgagagaaaggctttcaggcttgtggtgttggtggactaagtgtggcttctggccattcacacagtcaccacactgcaagggagctgggaactggagcctgtgagaagcccctgtgaacaatgttctctgtcttaaaacagcttacacggacttctcctttttacctctaaaagattcattcccctttccccaaccatataccccagattgcaaccccttgctattctcaaataaactttttgttttggagtgtcagtctctctctcgcttattttagcttgatgtgagtagcttgcagagttgtgctgcataaggaaagaaaataaataggaagtagctgtcaggggagtgggctagaaatgggttgttggtttggttatttctgcagggggaggggttttctgcaaattatatgtaatgaggctttgtttattgtggtaaaatgtgtattacataaaatttaccactttaaccactcataagtgtacagttcagtagtattaagtacattcacattgtgttcctatcaccactgtttccagaagttttccatcatcctaaagaaattctggactcagtaaacgctatctaaatccccattcctccccctagtcctgataaccaccattctattttctgtccccatgaatttgtctagatccctcatagaaatgaaatcataatagtatttatctttgtgtgactggtttttttcacttgtagaatgtgtcagaatttctttctatgctatggctgatactccattgtatgtatataacacattttatccatctgttgatgaacatttgggctgtttctaccttttgactattatgcattgtgctgttatgaacactggtttgtgtggtcagtatctgtttgagtacctgctttcaagtattttgagtttgtaactaaggagtggaattgctagatcatataattctatgcttaacttcttgaggaacaccaaactgtttctcatagtggctgcaccattttacattctctccagcagtacacaatgattccattttctccatatcctctccaacacctgttttcctttttaaattttttttttttttcttgagacagagtctcactctgtcgccaggctggagtgcagtggcacaatctcggctcactgcaacctccacctcccgggttcaagtgattctcctgcctcagcctcccaagtagctgggactacaaggcacgtgccaccacgcccagctaatttttgtatttttagtagagatggggtttcaccatgttggtcaggttggtctgaatctcttgacctcgtggtctgcccacctcggcctcccaaagtgctgggattacaggcgtgagccactgtgcccagccttaaaatttttataatggccatcctaatgggtgtgaagtgatacgtcactgtgatttttgttgttgtttttctgagatggtatcattctgtcacctagactggagtgcagtggcttttcttttttctttttttttgagacagagttttcctcttgttgcccaggctggagtgcaatggcacgatcttggctcactgcaacctccgcctcccaggttcaagcgattctcctgcctcagcctcctgagtagctgggattagaggcacctgccaccatgcctggctaatttttgtatttttagtagagatggggtttcatgatgttggccaggctggtcttgaacttctgaccacaggtgatctgcccacctcggcctcccaaagtgctaggattacaggcatgatccactgcgcctggccgtgcagtggcatttctgcactccataatcatgactcactgtggccttgacctcctgggctcaagcaattctccttcctcagcctcccaagtagctgcgactacagatgcacgccaccacacccagctaattttttttcaaaatatttgtagagactggctctcactatgttgatttgcatttacctaatgattagtgatgctgagaaatcatctcaagtgtttattcaacatttgtatatcttctttggagaaatgtctattcaagtcctttgctttttttttttttttttttttttttttttttttgtagagacagggtctcactacgttgcccaggatctctgctttcttttttttttttttttgagacagagtcttcctgtgtcgcccaggctggagtacagtggtgtgagcttaactcactgcaacctgcacctcctgggttcaagcgattgtcctgcctcagcctcctgagtagctgggattacaggtgcccaccacaacgccaagctaatttttgtatttttagtagagatggggtttcaccatgttggccaggctggtcttgaactcctgatctcgcaattcgcccacctcagcctcccaaagtgctgggattacaggtgtgagccactgcacccggccccctgctcatttttaaatcaggtgcattgtttcattgttgctgaattgtaggtgttctctatattttctagatattaattccttatcagatacatgctttgcaaatattttctcctattattctgtggggtctctttaccatctcttttttttttttttttttgagacagagtctcactctgtcgcccgggctggagtgcagtggcacgatcttggctcactgcaacttctgcctctcaagttcaagtgattctcttgcttcaccctcccgagtagctgggattacagatgcctgccactacgcccagctactttttgtatttttagtagagatggggtttcaccatgttggccaggctggtctcgaactcctgatctcgcaatttgcccacctcagcctcccaaagtgctgggattacaggcacgagccaccgtgcccggcggcctcttcatgctcttgatagtgccttaatgatgcacaaaagttttttttttttttttttttttttttgagacggagtctcgctcggtcgcccaggctggagtgcagtgctatctcagctcactgcaagctctgcctcctgggttcacaccattctcctgcttcagcctcccagtagctgggactacaggcgccctccaccactcctgggtaattttttttttttttgtatttttagtagagacggggtttcaccgtgttagccaggacggtctcgatctcctgacctcgtgatccgcccacctcagcctcccaaagtgttaggattacaggcgtgagccaccgcgcctggcaaaagtttttctttttgatataatcccatttatctattttttttttcattttgttgcctgtacttttggtgtcatatccaaggaaccattgccaaattttaatgaatttctaggtaaccatttattataaattatagtacagctatataatgaaacacctctcagcatttcttataaaaagaaatgtactatagcgatacaacacagatgaatctggaaacattatgctgagcagaggaatctagacacagaagacgatatgctgtgtgattccgttcagatgaagttgtagaaaagatgagtctaactggtagtgatagaaagcagatgggtggcagcctggggctgagttggggtgaggactgagtgcgggggggtggtggtttctggagtgatagagatgttctgtgtgtcaaatgtgggggtggctgcatcgccctatgcatttgtcagaactcattgaattatgcactggagaatggtgtgttttattgcaagtaaattatgcttaaaaaaaagttgaatcaaaaatatttttaaaaaccatccattaattcagaaacagtagggatgcattgtacaaaactagaaaattcagaccagcaagagaaggagttttgcttacttttccgaagggaggtgtgacagcatatttgtatgctgttgaaaatgacacagcagaatgcaaagttcaagctgtaggacagggatggctcaggtagaagcactgagagtttgtttctgggaacaagcagccatgccaatgctggcaagttggaagtttgtggaagttcttgtctcatttcttcaatggttcttagtgagcttgagagcaaggtagacaaccctcctgaggatgaggatagggggagaggtattgggcctttgaggagaaagaaggcacgagatggttgtccaggagaggaagagtggatggatgcggaagtcaagcatgccccaagcaagcatggggatgttcccaacccaggtgcaggtgcagagtaggaagaggcctgtggttttgcaagtacaggtgagtgaagagtcagggagttgttgtgtgtgcaagggagtgaagtaagtgaagaccatggaattcaagctggatacggagggagagaggacttcaaggggatgaaggtggtagcaccaatggattggagatcttggtgggctcaaaggatggatggaatcagaattctagaaaattggggctgaacttggtggctcacacatctataatactagcactttgagaggccaaggtgggaggatcacttgagcccagaagttggagaccagcctgggcaacatggcaaaaacccatctctacaaaaaatacaaaaattagcgaggcatggtggtgcatgcctgtagtcacagctaccagggaggctgaggcgggaggacctcttgagcccaggaggtggaggttgcagtgagctgagatcacaccactgcactccagcctgggtgacagagtgagaccctgtctcaacaacaacaacaaaataataaataaaaatagaaagttggaaagggagaagctttcacattcaaatttggtcagacctctctttaccttaaaagtgttcctattgcccacaagatcaaatccagacccctcaggagaacctcaggtgtgaccagtcctctgtgacctgtccagcatccatctggcttgctggagatgctgccagacctgcagagcccccaggcagagcccacaggaaatccccccagccctgctcattcccactttttgaccttggcctgacttactctctaagggaaccatcttccccagaacatttttcctgatgtttctgcctgcaccatccactctgtattagggtccaccatgcatgctcctggaccccatgctgctcatctctttagtggggaggaatcttactccattaactttattttccttatctcaaatcagattaacagcctgcatcgtgccaaggttgcagaaaatgacacctgagtgtttcttattgggactctcccttcacctggtcacaaaagggcctcgtgtcagtgtctcaggctgtaggtgctgaagctctggagagatccttctcatctttagtctctccagttaccatgcaagggccccttgcccagacccctttcctttcccatctaaatggcaacttctaccactcttgggggccaagaatatttgccatttcccaagactaggaactcctggccgggcgcggtggctcatgcctgtaatcccaacactttgggaggccaaggtgggcggatcacgaggtcaggagatcgagaccatcgtggctaacacagtgaaactccgtctctactaaaaatacaaaaaattagccaggtgtggtggtgggcacctgtagtcccagctactcggcaggctgagggaggagaatgaagtgaacctaggaggcagagcttgcagtgagctgagatcactgcactccagcctgggggacagagcaagactctgtctcaaaaaaccaaaacaaacaaacaaacaaaaagactaggaactctggggcctggtcaccctgggtgtaccacagagccattccctgctgccacctgaggccaatcatccctccaatgcacctagagagggcccccgtgcaattgtctctgcctaaccgtgttccataagggctggggcctgaagcttcctgtaagaatgaagacagcatttaggaggtctactggctttgttttctggatttcagcccagaagttttctctaaaaccctcagatgttaactcatcacagaagacacgactaggttcaaaaggacaaacagccctacacactaccccaactccagacgtctgaggttactgcagcttcaataaagtgtgcatcaattagaattaaaatgctcctttttccatcctgggtcacatggcaaaacccggtctcggccatgtgcagtagctcgtgcctataatcctagcactttaggaccaggtgccgtggctcaagcctataatcccagcactttgagaggccaaggcgggtggatctcttgaggtcaggaattcaagaccagcctggccaacatgataaaactccatctctaccagaaatacacaatagccgggcatggtggcgcacgcctgtaatcccagctactcaggaggctgaggcaggagaatcgcttgaacccaggaggcggaggttgcagtgacctgagattgcgccactgcactccagcctgggcgacagagcaagactctctaaaaaaagaaaaaagaaaaaaaatatacaaatcctagcactttgggaggccgaggcaggaggataacttgagcccaggagtttgagaccagcatgggcaatgtagtgagaccctgtctctatttaaaacaaataaacaactgggtgctgtggctcacgcctgtaatcctagcactttgggagactgaggcaggtggatcacaaggtcaggagatcaagaccatcctggctaacacggtgaaaccccatctctactaaaaataaaaaaaataaaaaacaattatttgggcgtggtggcacgtgcctgtagtcccagctacttgggagggtgaggcaggagaatcgcttgaacccaggaggcagaggttgcagtgagccgagatcgcgccactgcactccagcctgggtgacagagtgagactccatctcaaaaaacaaacaaaacaaacaaacaaaacccagtctctactaaaaatacaaaaattagccaagtgtggtggtgcatacctgtattcccagctactcaggtggctgaggtaggagtattacttgagcccaggaggtcgaggctgcagatcgtgccactgcactccagtctgggtgacagagcgagaccctgtctccaaaaagctctttttcctgggtcagagtcaaccttcagagaacaccccatgctgggtaaaaataaatatcttctttcttctttttcttttcttttttttttttaagacggagttttgctccttgttgcccaggctgaagtgcaatggcgcaatctcggctcactgcaaccgccacctcctgggttcaagcaattttcttgtctcagcttcccaagtagctggggtcacaggcgtgcaccaccatgcccggctaattttgtatttttagtagagatggggtttcaccatgttggtcaggctggtctccaactcctgacctcaagtgatccacccgcctgggcctcccaaagtgctgggattacagtatcagccactgtgtccagcaaaaatgaatgttttcatcacaggtgcaacatgctcccccacagcctgtcccaacatggtagcctgtacctttggtgaatgtccaggcttggggaaaaggggtgtcaatggcacagtggctcacacctataattccagcactttgggaggctgaggcaggtagactgcttgaggtcaggagttcgagagcagcctggccaacatggtgaaacccctctctactaaaaatacaaaaattagccaggcatggtggcgcatgcctgtaatcctagctacttggaggctgaggcaggagaattgcttgaacccgggaggtggaggttgcagtgagcggagatcgcaacactgcactccagactgggcaacagagcgaaactctgtctccaaaaaaaaaagagcctggcacagtggcttgggcttgtgcttgcagtcccagctactctggaggctgaattaggaggatcccttgagcccaggagtttgaggctagcctggccaacatagcaagacccaagctccaaataagtaataataataataatgtgatgattctcacatactcattctatcttttgctgacttcctgtctttttgttcacttatctagctctccagccaagctctgagcttcctgagggcagggctgctgtcccattcatttctctatccagaggacacacgagttgtgctcacctgacaccagctgagcagccaaacagttccattagccaattcgatttgagcagattggtgcacactactgtgcaccagtattgggtcccagctactcgggaggctgaggtggaaggatcccttgagctggagaggtggatgttgcagtgagccaagatcgcaccactgcactccagcttgggggactatgtgagatgctgtctcaaaagaaagaaaaaaaagaaaagaaaagaaaaaaaggaaaagaaacaaacaaaagtcaagagacaagctttggtgaaaccttggggagggaggcagtgaacttgtttgaagactacctctccaagttctatctctggatgaagagttttaagggaaattaggggagtacaaatgatgatcaaggcattcttatgaaacgcgcagtctcaggctggcagttaagtgttaattccttggtcaatgtcttgtggccatctgcaggcaccatcaagctgttcttatcaggctggtcagcctgttcctagagttgttggtcagcgtattttcttttatgtctatcgaaggtcctgttttcctgaggctgtttttaatgaaaaatctacaaactcaaacaaagcataattatatcaggcaaacaaacttttctctaacatggagtcagtactgttaaataaatgaacaaatttgaacaaggaatactgtcccggttagataactgtgattataagtgaagtccagatttgcccctagttactttgccagaatttcttctgaaatgctttacttatttatttacttttgttgtggtaaaatagatataaatatacatgaaatttaccattttaacctttttttttttttgagacgaaattttgcccaggctggagtgcaatggcgcaatctcagctcaccataacctctgcttcccgggttcaagggattctcctgcctcagcctcctgagtagctgggattacaggcatgtgccaccgtgtccagctaattttgtatttttagtagagatggggtttctccatgttggtcaggctggtctcaaactcccgacctcaggtgatccgcccacctcagcctcccaaagtgctgggattataggcatgagccactgtgcccgggccattatacccacttttaaggatatagttcagtggtattaagtacattcgcattgttgcacaacaatcaccaccctttgtctccagaactttttcatcttcccaaactgaaactctgcacccattaaacactcactccccaggtatattttccttagagaaatttcaattcaagccctttgcccattttttaattgggttgttttcagatatgtgatttgcaaatattttctcccactctgtgggttgccttttcactgtgttgatagtgtctttttttttttttttttttttttttttgagacagtctcgttctgttgcccaggctggagtgcagtgatgcaatcttggctcactgcaacctccacctctcgggttcaagtgattctcctgcctcagcctcccaagtagctgagactacaggcatgcaccaccacgcccagctcttttttttttgtatttttagtagagacggggtttcaccatgttggccaggctggtctcaaactcctgacctcaggtgatccgtccacctcagcctcccaaagtgctgggattacaggcatgagccaccgtgccaggctgatagtgtcttttgatgcacaagccaaatgtttctacggttccggtagcagcctctccagaagcatttaaactccacctcaagggctcattgcacagcatgcacacaaaggcttgtaggtggccttccgggttagggtttggagggcccagaccttccaagcaggagagccggttgcctagagcaagtctgatgtgcggtcatctcccttgacccttgaagtaggcatgattctaacgttacctgagaagaactgaggcccacagggatttcatggaagcagatacaacagcaaagatgccaggattctcagaaggtgagtcattttccaaaactcttctgtttccccaactaaaaactggaagtgaacctgcctttgtgggcacaaaggtggtggtgaaggaggctccgagagccactgatgtagaaggtggaggcagagagaggacttacaggcccccaacctgggtcagggttcttcaggcctccacatcttcatgggccacccaagttgttctcaccactataatcttctttaaaccttacagaaacatcatacatttatttccacctacagcctaccatgttactttggagtcacaggacttggaattgaaagccctggattatcatctcagtcctgccattgaatggcttgagcactgggccaggcactttgcatagctcaagacttcactttgtaaaatgcagatgagagtggtaagctcaaagtttgcaaaagctcctgtctagcccagagcctggtgcatagtagatgcttgataaataggggttaaatctgagaaattccatgacatccagagagaagaaacaatttccaatggttctggcattcaacaacaacttatcagcaagcaaactacatgccaggtgctctacagccattatcttcttctttttttttttttttctgagacagagtctcgctcttgtgacccagcctagagtgcagtggcgcaatctcagctcactgcaacccccgcctcccgggttcaagcttctcctacctcagcctcctgagtggctgggatcacaggcgcctgccaccacgcccggctaatttttgtacttttagtagagacggggttttgccatgttggtcaagttggtctctaactcctgacctcaggtgatccacccatcttggcctcccaaagtgctgggattacaggagtgagccaccacacctggcctcttacttcatttttataacaaccacattattcccacttttaggatgtagaaacaggctcagagaggttaagacatttagccaagctaggccaggcacggtggctcacgcctgtaatcccagcactttgggaggctgaggtgggcggatcacgaggtcaggagatcaagaccatcctggctaacacggtgaaaccccgttcctactaaaaaaaataatacaaaaaattagctgggcatggtggtgggcgcctgtagtcccagctactcgggaggctgaggcaggagaatggcgtgaacccaggaggcggagcttgcagtgagccgagattgctccactgcattccagcctgggcaacagagcaagactctttctcatttaaaaaaaagaaagaaagaaatttagccaatctcatacagttaggaacctggaatgtgaacacaggcggtatgattttcaaggacatgtttcctccccccaactttttattaataacatacagaaaagttggaagaatgatttaataaacacccacataccctccccccagtttcaacaattgttaacatattggcacatttactttaccctgctatctctaaatatatacattctttgtttgtttgtttgtttgtttgttgttttgttttgtttttgatacagagtcttgctctgtctcccaggctggagtgtggtggcacaatctcggctcactgcaacctccacctcccaggttcaagcaattcttgtgcctcagcctcccgagtagctgggattacaggtgcccaccaccacaaccggctaattttcatatttttagtagagacggggtctcaccatgttggccaggctggtcttgaactcctgacctcaagtgatccgctcgcctcagccacccaaagtgctgggattacagatgtgagccaccgcagcagccctactttggttttttttttttttgagacagagcctctctctgttgcccaggctggagtgcagtggcgcaatctcggctcactgcaacccctgcctcccagtttcaagcgattctcctgtctcagcctctggagtagctgggattacaggcatgagccaccatgcctggctaatttttgtatttttagtagagacggggtttctccatgttggccaggctggtcttgaactcctgatctcaggtgatccacccgcctcagcctcccaaagtgctgagattacaggcgtgagccaccgtccccagccccatatatacatactttgaactagttgagtaaggtacagatgtcacacctactatggactgaatgtttgtgatgtgatggtatttggagttggggcctatgggggtaattagagttggatgagttcatggggtaagatactgcttatgatggacatggtgcccttgtaagaagggacaccagagagcttgtctctctgagagcatgcactaaggaaagggcatttgaggacacagtggcaaagtagccctctgcaaaacaggaagagagccctcaccggagtgcaactatgttggcatcctgatctcagacttccagcatccagaatgtgagaaaataaatgtctgttgtttatgccactaagtccatggtatgtcacacaggctggagtgcagtggctcgatctcggctcactgcaagctccgcttcccaggttcacaccattctcctgcctcaacctcctgagtagctgggactacaggcgcctgccaccacgcctggctatttttttctttttttgtattttttagtagagacagggtttcaccgtgttagccaggatggtgtcgatctcctgacctcgtgatctgcccgcctcagcctcccaaagtgctgggattaaaggcgtgagccaccgcgcctggcccaagtccatggtattctatggcagcctgagccgactaagacaacccctaaatactgcatgtacatctgctaagaataaagacattcgcttacatcatcacaccaagaaaattggtaagctccagaatattcaatatccaattcgtagttagatttcttccaaattgtcctcagaatgttttctatttattcaaaatttttgtttatttatttaatttattttagagacagcatctcactctatggcccaggctggtgtgcagtggtgtgattatggctcactgcagcctttaccttctgggctcacgtgatcctcttgcctcagccttctcagtaatcaggactacaggtacacaccaccacacccagcttggaatgtctttttttttttttttttttgagatggagtttctctcttattgcacaggctggaatgcagtggcacaatcttggctcattgcaacctctgcctcccgggttcaagcgattctcctgcctcagccccccaagtagctgggactacaggcgtgcgccaccacgcccagctaattttttgtatttttggtagagatggggtttcaccgtgttagccaggatggtctcgatctcctgacctcgtgatccacccgccttggcctcccaaagtgctgggattacaggcgtgagccactgcacccggcctctaattttgtacttttaatagagatggggtttcgccatattggccaggctggtcttgaactcctgacctcaggtgatccacccacctgggcctcccaaaatgataggattacaggtgtgagcctctgcgcctggcccagaatgtctttttataggtgcttttaaatttttcaaccagaattaactggccatggtagcatgtgcctgtagtcctagctacttgggaggttgaggctggaggatcacttgagcccaggagttcaaggctgcagtcagccatgatcataacactacactccagcctgggtgatagagagacaccccatctctaaaaaaagaaaaatagcctgtaatcccagcactttgggaggccgaggcgggcggatcacgaggtcaggagattgagaccatcctggctaacatggtgaaaccccatctctactaaaaatacaaaaaattagccgggcatggtggcaggcgcctgtagtcccagcaactcaggaggctgaggcaggagaatcgctcgaacccgggaggcggaggtttgcagtgagccgagattgtgccactgcactccagcctgggcgacggagtgagactgcgtctcaaaaaaagaaaaaaagatagccaggcgcggtggctcacgcctgtaatcccagcactttgggaggccaaggcggacggatcacgaggtcaggagatcgacaccatcctggctagcacggtgaaaccccgtctctactaaaaatacaaaaaattagccgggtgtggtggcgggcgcctgtagtcccagctactcgggaggctgaggcaggagaatggcgtgaacccgggagatggagcttgcagtgagccaagatcgcgccactgcactccagcctgggcaacagagagagactccgtctcaaaaaaaaaaaaaaagaaaaaaatatataaatttaaataaaataaaaatttcaaccagaatctggacaagttccacacacgtaacattttttcatttagaacaatctccctacttaccccctggccactgtcattgacaattttgatgaaccaaggccaattgccttataaaatgttccactttctacatttatctgatgtttcctcatgcctaaactcagttacagtatttttggcaagaattctacataagagatgctgtcagccagatgaggtggctcatgcctgtaatcctagcaccttgggaggccgaggtgggaggactgcttgagaccaggagttcaggagcagcctgggcaacatagtgaaaccccatctctacaaaaaaaaattttttttaattagccaggcatgatggttcgggcctatagtcacaattactcaggaggctgaggtgggaggatcacttgagcctggaaggttgaggttgcagtgagctgtagtcacgccactgcactctagcctaggcaatagagggagagcctgtctaagaaaaaatgtcacgagatgctgtctactttacactgcttcgtatcaggaggcatctgatggtaggtgatcctgagttggagtactgcgttaaggtggtatggggggcaggtgcagtggctcatgcctgtaatctcagaactctgggaggccaaggctggcagattccttgagctcagaagttcaagaccagactgggcaacaatggtgaaactccatctctacaacataatacaaaaatcagccaggcgcggtggctgattttctcccagactgaggagggaggatcacctgagcctgggaggtcgaggctgcagtgagctgtgatcacgccactgcacaccagcctgggtgatcaagtgagaccctgtctcaaaaaaaaaaaaaaaaaaaaaaaggtggtatggggatccactttttttttcttgagacaggttctcgctctgttgcccatgctggagtgcagtggcagcatcttggggatccattttgaacctcttcaagcttgtcccacctgaggtctgcagccacatgtggcccaggaccactttgaatgtggccaaacacaaattcgtaaactttcttaaaacattatgaaatttaggcagggcacagcggctcacgcctgtaatcccagcactttgtgaggctgaggcaggcagatcacttgaggtcaggagttcgtgaccagcctggccaacatggtgaaacctcgtctctactaaaaatacaaaaattagccgagtgtggtggcacgcgcctgtaatcccaactacttgggaggctgaggcaggagaatcacttgaacccaggagtcggaggttgcggtgagccaagatcacaccactgaactacagcctggatgacaaagtgagactccgtctcaaaaaaacaaaactaaaacaaagaaaaaaaaactgaggttttttgtttgtttgttttttgagatggagtttcgctcttgttgcccaggctggagtgcaatggcgcgcaatctccactcaccgcaacctccgcctcccgggttcaagcaattctcctgcctcagccttcccagtagctgggattataggcgcgcgccaccacgcccggctaattttgtatttttagtagacatgggtttctccatgttggtcaggctggtctcgaactcccaacctcaggtgatccgcccgtctcggccttccaaagtgctgggattacaggcgtgagccaccgcgcccggccaaaacattgagggtttttttggcgatttttttttaagctcatcagctatcgttagtgttggtgtattttacgtgtggcccaagacaattcttccaatgtggcccagagaagccaaaagattggacacctccatttatagtataaaatgaaagccactaggctttcggctcagccccttttccttacactgccagtcagctgcgctcagggacccgcagttcagagttcaacacgggcagattccctctcttccttgcttgctcctgccagccgcagccgtgggccagtacagcatggcccggccccgccccggctctttccagaggtccgcagcctggccggcccagcgggcggaaccgatagtgtctggcacttggctcgcccggactctgaatcctggagcaccaggcgcccacgagaacgctgttctctttggcttccgggcgcacgctactctgtcgccgccgtcagaccggaattgccggtgccgccgccaccgctgtctgtgcgcccacctctgctgctaccatggggatcttagagaagatctcggagatcgagaaggagatcgctcggacacagaagaacaagggtgagggccggccgggcggggccttcctttctgcctgcctcagttttcctgtctgtaaaatgggggaacaactccagcagtaatgctggggcaagatccgaggccgcggagaagttgccagacaagtgccgaggccgccctgcgcgcccaaggcagggccaggcgggagcgggtctcacgcccaggtctgactgcaaacgtaccccaagagatctggtcagtcccagaccgtgtgcccgagtagagtagtcccagctcacagagcaagcatctgacccagagagaggcggagctggggttcaaacctcagtctcctgatggctgggcctggggcctgggtctactctgttgttttgggaagtgcaagaggagacctctcaggaacagcctcacccagcagctgagagcccattggagcaagggaatcaggactctggagtctggaaggcctgggtttgagccccaggtccaccacgtaccttctgtaaaacattggaaagtcacttcatttcttggagtctcagtgtcctcatctgtaaatggggtaatactcccctgctccatcttagtacacagctgagttaaattagatggcctttacaaagcactgggcacatggtgagcactcagtatttaaagtaaacaccccaacatagataatacataatgaagcctcaaatctggactttagaatgtaagggctggaggagctcacagaagagaggtgaggagagaacgatgacaccaggacaaagtgggacttgagctggttgttggaagggtatcccaggtgggggccactgctgagacaaagacatgggagtgagcatggtatgttcatgggacagtgagaacaatctagatcagaagggggttatggaagagtaatgggagatgcaattggccaggctagtggctagccattcaggcttgtgggagcaggaagcaagcaacactagatagctggtcccagtgtctgccctcccttggttccatttaggtttgaaggccaaggagttgagggccctctatgactcattccttctgtaaatcttttttgtttgtttgtttgagacagtcttgttctgtcacccaggctagagtgcagtggtgccatctgggctcactgcaacctctgcctcccaggttcaagcgattctcctgcctcagcctccaaatagctgggattacaggcacgtgccaccacacccggctaatttttgtatttttttagtagagagggggttttgccatgtcgtccaggctggtctcaaactcctgacctcaggtgatccacccgcctcggcctcccaaagtgctgggattacaggcatgagccaccgtgcctggccgatctttcctgagcctttactatgtgctaggcactgtggttaaagcagtgaacacagcaggcatatcccagcccttggatctgatcttctagttgacggtctgaaaactagaaatcaaataaataagataatgtcagccagcaatatgtgctatgaagacaaaccagggtgatacagcagaatattgggggtggggagggactggggattgggtctgcttaggtggagtgatagagaagaccaccatgaggatggggcatttgaactaagacctgattgaaaagaaggaaccggtcacgcaaacatctgggggaagagggttcctggcagaaagagcagctagtgcaaaggccctgaggcaggaacaaacttggctgtttacaggtcaacaggactggggctggggtgcagtgatgggacaggagggggttgatcatgcagagccataggtcatgggaaagactctgggttgtgttctaaggcagtgggagctggtgcagggtgttaagcaggggaggggctattctgacttctgtcttgaaagttccctctggctgctgtaatattccatattacccataagacccaaggaaagtcacagggaggctagagatgctgccactttggcagtagtagacaaaggagatataaaggtgattaagacctagtccctcccttcagagatgctcagaattttaggagctgggatgacaggaagggccatgtgtacctgactgacactgaatccttttttttttttttttttttttttgagacagtcttgctctgttgcccaggctggagtgctggagtgcagtggtgtgatcatagctcactgtaacttcaaactcctgcattcgagcaatccttccacctccacctcttgagtagctgggactacaggtgtgcaccaccacaccgggctaatttatatatatatatatatatatatatatatatatatatatttttttttttttttttttttttttttgagatggagtttcactcttgttgcccaggctggagtgcaatggtgcaatctcggctcaccgcaacctccgcctcccaggttcaagggattctcctgcctcagtctcccaggtgtgtgccacaacgcccagctaattttgtgtctttagtagagacaaggtttctccatgttggtcaggctggtttcggactccggacctcagttgatccgcccacctcggcttcccaaagtgctgggattacaggcgtgagccaccccacccggccaatttttatgttttttgtagaggcacggtctcactatgttgcccagggtagtcttgaactcccagcctcaagcagtcctcccttctcagcttccccaaagtgttgggattacaggtgtgagccaccccacccggccaatttttatgttttttgtagaggcacggtctcactatgttgcccagggtagtcttgaactcccagcctcaagcagtcctcccttctcagcttccccaaagtgctgggattacaggcatgagccaccatgcccagctgcagaacccattcttgaccatttcttactgctatcaattcactgattcacttggtaaaatatttcctgtgtgcctgggccctgtgctggaggctggggatccagtcccatttcctgacctatcggagtcagggaagtaaagaaataagatcattttcagagtcgagaagacagtaaacctgctcatgaggcaggaagcagtctggggaagggcggaatttactgtagattatagccaacttttattgggtgcttactgtatgctaagcgatgttcttagtgctttctgtaagacttctccattattccaccatcaaaaatctgctgaagtatggtcaggcacagtggctcacgcctgtaatcccagcactttgggaggccgaggtgggtggatcacttgaggtcaggagtttgagaccaacctgggcgacacggtgaaaccccgtctctactaaaaatacaaaaattagccaggcatggtggcaccagcctgtagtcccagctactcgggaggcggaggcaggagaatctcttgaacccaggaggtggaggttgtagtgagctgagatcgcaccactgcactccaaccggggtgacaccagtgagactttgttggtggctcacacctgtaattccagcattttgggaggccaaggcgggcggatcacctgacgtcgagagttcgagaccagactgaccaacatggagaaaccccatctccattaaaaatacaaaaaattagctgggcatggtggcgtgtgcctgtagtcccagctacttgggaggctgaggtaggagaatctcttgaaccctggtggcagaggttgcaatgagctgagatcacaccacagcactccagcctgggcgatacagtgagactccatctcaaaaagaaaaaaaaagaaatctgcctaagaagttactactgttaataaccctatttgcagattaagaaactgatgcacaagaagactaacttttccaaagtaaaatggccccactaatggcagggtggagttctgacacaagctctcactgccctctgagactgggcaggggaggcctctttgaagaagtgacatttgagctgcacctcaaatgatggtaaggagccagttccaggaagatctcgttgaaatggagagaatcgccagtgtgaaggtcccaaggaaggaatgatgtcagcatattctagaaaaggaaaaaaagaaaggccaggcccagtggctcaacctgtaatcccagcactttgagaggctgaggcaggaggattgcttacagccaggagttcaagaccagcctgggtaacatagcaacatctcatctctacaaaaacaatttttttaattaggcagtcctggtggtatatgcctgtagtcctagttattcaggaggctgaggcaggagttcaagactagtgagctataatcgtgccactgaactctagtctgagtgacagaatgagacccccatctctttaaaaaaagaggagaaagcaactgtgtctggaatgtagcagagtgtgttgaagtagccaggagccaggtaacatagggtcctggttctcagtctcaacgacggcctccttttagagcaaagagtttgtaacaccatttacagtcctgaaatgaaattccccatcagtaatataacttgaatttgaaaaaaaccaatataataccctaatagtaatataaaggagaagaagaaaaaggaaagtaatttataatgaaaatggtatttatttaaatacataaatgctggagtgctgccaggatctaacgaagttaccctgaagcagtagaatgctcatgcctctaggtagaatcactggggatgtgacagccacgatgcaggtgtgttgtattggccactgagttacaccccaagaggggctgccatggcagcgtgggatcccagaatggtgagcagctctaggtaaagtttcagacaaagcatgacatagtcttcccttcatatacataatagttgcattcctgggaatttcagtgtatattaacactgtacaaaatgtcctgtgtttatatgtaaacagagctaggttctaggcctggcgatcctaacccaggttttccctctgtggatgcctttgggatgtgacaagtcatggacttgggataattctcctcagctacataggactgactcacctaatagggcagctggtttccctgccccctgcccaatagatgccaatgcgtacttcaccatcaaagtgaacagaaaacatctcccagaatttccagaatgccccccaggaagcggtgccccctctgttgagaaccattggtgagaaccatttggtgaagtctcaacaaagaggcgggatttttttttttttttttgagatggagtttcactgttgttgcccaagctggagtgcaatgacgtgatctcggctcaccacaacctctgcctcctgggtcaagtgattcttctgcctcagcctcccaaatagttgggattacaggcatgaacgaccatgcccagctaattttgtatttttagtagagacagggtttctccatgttggtcaggctggtctcgaactcctgacctcaggtgatccacccgcctcggcctcccaaagtgctgggattacaggcgtcagccactgcgcccggtctaagagactggattttatcttaaatgaagtgagaagccaagggggccttttaagcagagagattttttttttttctcctgatctccttgacagcagttgcttcccagccagcacttggcgacatgtgggccctgcctgacccctgggcttggacaccctggccactcatcttctgtcttgctttccatcctttagccactgagtatcatctgggcctgctgaaagctaagctcgccaagtatcgggcccagctcctggaaccgtccaaatcggcctcgtccaaaggagagggctttgatgtcatgaagtcgggtgatgcccgtgtggcgctgattggatttccctctgtgggtaaggtcagtgatggtcagtgtgggcctcggggaggaaagcaagaagtcatctttcaaacaggtgaccatccaggctcccctcgctgcctttctgcttagctccagggacacagaagacctggcctcccccagggtcagatcccagccctttatcatcctaacatggaggacgctctttcctcttgccagcagatggagccctacttggtcttccgactcagtcatcacacacaaatacttctcgagtgtgtatctctagcggtgtcatgtgctgggcactgtgccagggactagagacatagcatgaatgagacagagctctgtccctgcccacatagatctcccattcttgaagagaaaggacagtaaataagtaataaggtgcatccagtggtgaggagtgggggctggtgagtgacagggtgaaggtctgctagttacgacaggtcccggcaggtttctctggtgagtgagtatttgggcaggggcctgaaggaagtgagtgagcttgcagagtcctgggtgagaaccttccagacagagggaacagtgagcacaggcccttaggcaggtgctcgcttggtgtgtccagggaggcccaggtggctctctgaggagcacaaggagggcagaagacagagaggatagcggcatatgggcggccgaaaggaccctggcttggattgaagaatgaaactgcagagtttttagaaggtttcttcggccgggcgcggtggctcacacctgtaaacccagcactttgggaggccaaggtgggtggatcacctgaggttgggagttcaagaccagcctgaccaacatggagaaaccctgtctctactaaaaatacaaaattagccaggggtggtggcgcatgcctgtaatctcagttactcgggaggctgaggcaggagaatcgcttgaacctgggaagcagaggttgcggtgagccgagattgcaccattgcactctagcctgggcaacaagagcaaaactccatctcaaaaaaaaaaaaaaaaaaaaaaaaaaaaagaaggtttcttctggaagttgctctgtttagcgtataatctatattggtttacttttttttttgagatggagtcttgctcggctcactgcaacctctgtctcctgggttcaagcagttatcaatcagcctcccgagtagctgggattacaggcatccgccaccacccctggctaatttttgcatttttagtagaggtggggtttcaccacgttcgccaggctggtctcgaacttctgacctcaggtgatccgcccaccttggcctcccaaagtgctgggattacaggtatgagccaccgttcccggcgtgatttacttttatgtgaggaataaaataaacatcattgcagggttttgagcagaaaagagatgtctgatcggctctttttttttttttttttttttttggaggtatagtttcactcttgttgcccaagctggagtacaatggcacgatctcagctcactacaacctccgcctcccaggttcaagcaattctcctgcctcagtctcccaagtagctgggattacaggcatgcaccaccccgcccggctaattttttgtatccttttttagtagagacagggtttcaccatgttggcaaggctggttttgaactcctgacctcaggtgatccacccgcccttggcctcccaaagtgctgggattacaggcgtgagccaccgcgcccggcctaaagtaaactttttattttagaatagtcttagatttacagaaaaattgcaaaggtaatacagagttcccatataccccacacccattttccctggcagttaacattttacaccaatgaatattgatctgttcttgcctcaagtctggctttatgcagatttccttagctcctccccactgtcctttttctgtcctgagatcccacatcacagttcagttgttatgtctccttaggctcttctagacagttccttagacttgccttgatttgataaccttgacggttttaaggagtaccattcccatattttgtagaaagtccttcagttggggtgtgtccaatgtttttctcgtggttaatctggggttatagttagcaaggaaggccacagaggtaaagtgccatttttatcacatcgcatgaaggccacatactgtcaacatgacttacccctgctgatgttgatcttgaccacctggctgaggtgtgtcaggtttctccaccgtggagacgctctcttctccccttgccatgccgctttggggagggaggtgactgtgtgcagtccaattccatcgcctccttgaggggagcatctacagaaactgtttggaattcttctgcatgggagatttgtctctcttctcccattcatttgttttattcaatcatttattgatatccgtatggattcgtggggggttattttgtgctttggggtctaaacccataccatgttcttttgctgctcaaatctttttagctttggagctattttagttggcttctttgatgtacttccaccattgtgtttttccagcacttcctcactttctgacactgcaagatgcctcaggctcattttgtatattccctgccctggcctagaatctgccatttctctaaggagccctggttcctttgattggagaatagcattagaaactaccatctgggcgctgacttacttttttacagaatcactctggctgttgtgtagatagcaggttatagcagggcaaagtgaagtgggacagtggagaggttgctagaatataggccaagtgagcaacaaccaaagctctggacaggtgctggggagcagcttctaactcagttcagctgaacaatttgagcccacacccagtttccattgctctgggccaggcacaggggatggtggttaacagctaccttttcttgagtgcttgctgcaggctgggcagtgtttagttttatttgttgtactgtctgcctatatgattggtatatgtatcagagagagagagattgatagagaagccgctctagttaccaagagccgtgacccttgaagtctgggcccatggcagatcccacctgccttattgggagtataggctctcccaccgtgggagggcccaggtcttacaggggccagacagaatcagggagtggccccgaggttggttgctggctgtctcaacagccattgctcttggggccaccgtgtctatccctatacctgtccactccaccaggtttttctcatttcttgagtttccaggagatccccaaggctgagggtttctggatttgggaactcgatgtatttccatcacatgccacattctggacttgagaggtctaagggtgccttggggagggtgcccccagtcttcctgccagtcagccaggaggcagggtctggatagctggccctgcaactcagagtctcaggcttctcgttcctggggccctgctgattaggatggggcaggaggcatggggctgggtttcttccctccctgggtctgcccactgcttggctggcctcagccacagcatctatcactgatgttacagtgtttggagtgaggcacatcccgggccttatctttttaatccctgtgcagtcctgtgaggtagggaccgggttcatgcccattctacatgtaaagaccctgaactgagagtatggagtttcctgcccaatcccaggacaccccggcagaggcaggattcaaagccaggtttctccaactcccagccacagtgaacggtggtctgagtggtcacatccacatcttcccagttccccactccctccctgcgacacctctcctgtcagctgtctctgcctcagcccaggaggttgacatctccttgcacacctccttacaccctccctgggtgcacagcatgtctgggtactggttccacgagtgccgtgggactgccacctgcttaaagttctctggggccaagagggcctggaggattgtgtggggttaggagaggctcctgatgtatatggggaaccccatcagaatccagatccctgcctctacctgagacagtcctgaggcctccaaggaacagatgggcctctggtgtctgacccatccaggacagggccagaggtgagccctctggctgggaggtctcttcacagccacctaggtcaccaagccgagggtgagagggtctcctcctgctgcctgcacctgcaggcccccagcccctggggcctctcccagaaggccagggacaaggctcctcagtgcaatgatctccttttctcctagtccacattcttgagtctgatgacctccacggccagcgaggcagcgtcctatgagttcaccactctgacgtgtattcctggggtcattgaagtaagtgggtgtgctgggcccagaaggagaaggggcgcatgcttgtgtttggacttgtgcctgtgcccaccctgtgtgtgagtctgggtggatgtccccatgtcaggacaggctctggactgagctgctttgccctccagcactgacacttctggggatcctagctgctggaccccagagatgcctggtggggcctggaactaggaggtcaggccagcatgtggctactttgcctggcgccccctgtgctctcctccccaacaccaccacagctctggtcactaattgctgcttggctggatccttctgcctccccatgaagcttcactgccttgggctgtgtttgctttgggcagctgagtggtatggccttaagttcccatggtgaaacaatttatttgtaaagtgctggtatcatcagtgatgagtgttgtgggattggaagatcttgagccctccctaggcggctactcagctcataggctgtggtctgcactgggctggggtggtgacaaggctcagacttggccacaggttggcatctgggtttccctcagcccctgagccccggggccattccagatgtcccagatccagacaggacctttccagtggaggcccagccttgccttacctttcttctcttctgcatcctagtacaaaggtgccaacatccagctcctggaccttcctggaatcattgaaggcgcagcccaaggtgggaggcagggcaggtgtgtgggaagcagactggagctctgttactgatcgttgaaattgggtgtggctgtcatggagatcactctggatccctggtccattatcccgctttccagaaaagacaggttccagttcaaatccttggcaccaaactagccttgtgatcttgggcaagtgattgggtatctctaagccaagcctcagtttcctcagctgtagaatgggcataataatacataatttacagcatagttttgaggattaagtgaggaaatgttcaggaagcatttagcctgggccctgccacatggtaggggtgggcgtaggacagccgttattatcctgttactccttttatgatggtggtgtcggattttcttctgaaataagtctccgtcagtaaaacatgtggattaaagaaaaatgccaagcttgtgctagtatgtggcagaggctgtggtaggtctgtaaaggacaggagtccagggcgccgtgggctgggtagcagtcacatgggtccacatatgtaactgcatccctcacacccatccaggaaaaggccgtggccggcaggtgatcgctgtggcgcgcacggctgacgtcatcatcatgatgctggatgccaccaagggagaggtgcagaggtccgcagggtggggcatggggcaggctcacatgtctggggagggccaatgtgtccctgagctcgtactaggcggcctgtgggtgtttggctctctcacacgtgagagtagtggtaggacttgtcacagactaaacccaacaccacccagcctatggcgtcttctcctcaaggcttgtgtccagccagcacagaggtatcttgggactgggggccgaggggcttggcctggccctgcttcctgttcagaggcacaggtgcctcatcactgcccagaacctgccaggagcccagccccaggcacagaagcattgttcatccacatcctggcagaggggtacaccaggcctgcctcctcgggaccagaaggagtaccctcatgtggtcacctcgcgggggctccaccacttgcctgtgcatgccgaccgtaaaccgggccagtcccctctgggactgtggcagagtttagaagttccctgcagctctagggcattgggaaggagtgttctctgggttgctggggaagggggtggaggagagagtcagtctctgggtgggcagtgacatcctgcgtaacagggaagctgtgcatctggctctgtggacagcctgtgaggggcttaaggggtactcttcctaggtctctgctggagaaggagctggagtctgtgggcatccgcctcaacaagcacaagcctaacatctacttcaaggtgaggcacctctctggccttcaggccaggggtgtggcagttttgagactgcattggctggcggctgaggctgtgggaccattgctgtgacccctcggtcagcagttctccccatccctttctcctctttcagcccaagaaaggtggtggcatctcctttaactcgacagtcacgctgacccagtgctcggaaaagctggtgcagctcatcctgcacgaatacagtatccttccctgaaagacacgtgaaggagggcagccaccaccgtcagcgcagcggggggactgactaagacaggaggcctcatggagcagggtggcagcaggtcacccccactgcccctgctgtccattcaagtagcctctgggcaagctccagactgccaggtctgcagccgtgcacttgacaatggcttcctggctcctcaccaagtactgggcactgtggtagccagatgacatccggaagaaaaagatgtcatgggaaacagcctctgaggacggggggttcctagcctggagaagccccagggagagctggggaatgggtggtgcctctaaagtagtgtcgggggctggttgtgttctggggccctggggatagggcagggccttgggcagagttatgcctggcatatagagaactcttagagtcagctgtgagcccctcgttgccagaggtgtgcaagcagaggcaggatggcccccagtggagtcctgcatggaagaagctgggttcgaccagctttcagatgctcctggtgctaaaacccaggcttcccctgaggggctttggggattctagcaggtacgtttttctccctgcctagctgtcaagattaaaactctgtgttgattgaaacttttatatattgtggtccctctggggaagagaacagagggcttccaaagcattacaatcttgcaaaacctcacaagcagataccgccacggtcccacacggccagcatatttcctgcttggctttttggggccctccgctgatgggggacaggggcagctggtgcacaggttgcccttaatcggagcccctcagagatcttcaatgcagaagtgcttttccgagaagactgctccccggacgagttcatcgatgtgatcgtgggcaaccgggtgtacatgccctgcctgtatgtaagtgcaggaggggagccctggcctggccactcggcctttctaccacatgcatttcctcagctcccggaaccttgtgagagaagcagaaagagtctgaggctctcccctcacctcacctcacctcagtggctgcttggatcttgcagacatagagagcttgaaaccagggttccagcccagccttcccaaccctgaggcagcaaggggaggaagggcgtagactcagctctccaaggaagggctgcagccggcacagggcgatggagggccctttcctggatgccttgctcctgtcctcagcaccggcctccaccttctcaatctcaggtttataacaaaatcgaccagatctccatggaagaggtggaccgcctggcccgaaaacccaacagtgtggtcatcaggtgaggccactggcatcctgccactctgctgtccttgctgtgggttctgaccccagtcgtcaggcctcccagccactttggctgtggaggaggaaaagccagcacagcctccagcagcacacagccgtcacggagcccaggacttcctgcccagggcagagcactttgtccatgaggccaaggagacactgcaggagggtccccttcatagctgctggaggcattggcccattccagttctgaattgccgtgggcagggtgggtgacgtcttgtgggctctggttaagaaaacagaaggatttcatcaaccaaggttgaatggctaagaggcttcttaacttaggccaggcgtggtggctcatgcctgtaatcccagcactttggggggctgtggcgggtggatcatgaggtcaggagatcgagactatcctggccaacatggtgaaaccctgtctctactaaaaatacaaaaattagctgggcgtggtggcgtgtgcctataatcccagctactcaggaggctgaggcaggaggatcacttgaacccgggaggtggaggttgcagtgagccgagatcatgccactgcactccagcctgggcgacagagcaagactccatctcaaaaaaaaaaaaaaaaaaaaagaggcttcttaacttagtagtgaaccaaggtccccccaagaagccctgggtgtgagcctacctctcctggtgctctggaaggtgtggcttctgtctgatcacagctcaaagggaaaaagggaactaatgttctcaggccctggccactcacttcctgccctcctttgcagggtgggtccctggggtaccgcctgcactctggatgtttgttcacttgccaccacagcctggcaggctcctctttggggcagactgattcaggtgctccactttgctggtttcctgacttgaggcaggcactccacagcttcacagtgaagcttggccaacagtactgagagctcagggaccaagaggctggacagcgcaaatgatggatgagggtcccggcctgagcacaaggaccattttgtggtggttgtagccaccacaaagagcagtgtcagttctacagcacagcctcaggtcctctcctcctgctgtgtcccaggcctttgaggggctgccatcctcagggcgtgagagcttctacacctttacctgcttgtgctcagaatagctctacagaggtcaggacacagctcggggtcacggcgcaaaccttcaagccacggtccacccagtatttggagcaaggcacatcccgggccttatctttttaatccctctgcagtcctgcgaggtagggactgggttcatgcctgttctacatgtaaaggctctggtgtctccagagccttggttctcccctcttcttgctgaaatccctgctggacttcctggcagtcccttgctcctctcaaggagtgaactctgggtgtcagggttcctagcctttgcccatggtcccgtcacagcccccggccatctcgccatggcagcccttcactaatcacacatgctgcaaccctccacagagcacaggcttgccagcccctaggagagatgctgaccctggttgagtgtgaccatgattggtgcccagaggcactggcagcagaaacatcaggctgccatcatagtaatgggcttgtttccctgtgggtaccagcgggccacctggccagtggaggttatccgctccaatagtgagaagtggagaccccagcctctgaattcacaggggcccctgcctgactggccgcctccctctttgcagctgcggcatgaagctgaacctggactatctgctggagatgctttgggagtacttggccctgacctgcatctacaccaagaagagaggacgtgagttgcactgcgcgtagctgaaaaacaggctgagcttcatccctagaaggctgccaggccggtgtgtggtgcccagagaccccagcaccggctctggcctggcttgtctagacacacctcagctcttttcccttctcagcactgggcactgctggttttgagggtaccctggtggggcaaggctaccttggggtccccactggctgtagcagtcagtgccctcctgacctcccctcacagtgacaggccctaccgcaggagcattagggacctgaatccacaggagccatccccatgtctaactcctgcccatcctcctggtgcgcacacacacatgccctggggtcccaacagctgaattcggagcagtttgcatcaaccctgactttggcaaggagtgagctacagcttccctcactagactccagcatccctttgcgccctgcccgttcagtccaggtcctggtctctgtcagtgctgtcacagcagatgggtggcaggcactgtgaatcctagacgtgatttattttgagtcactgtgttaagatcaaggtcgtagaagatggtacagggatctatgtggagggtgtgctggatgtcagggggaggttaggccaaggcaaggagaccgaaagggcctctgtggccagctcttccctcgcgcagaatcacaagatggcagtgtgggccctgatgtgtggctgacgttctccccatcctgccctgcagagaggccagacttcacagacgccatcattctccggaaaggggcctcagtggagcacgtggtgagttgacaagacctgccgtgacaaggggtgggagctctgcatgccctttggggctctgttctgcctgaggtgccctgggctgggggtgggctctgctggtctcactctcagatgtcaacgcaggctctggagttggacagcctggggctgcgtctgcagcaccccttcttagccatgtgccgaggctctgacctctactgtgaggggggtgtgctgcctgccccctggatagtcaggaggacacgttgaatgaggtccagtgtgtagggcactcagcatgctgcctggctttgcagagatgccagtaaccctgcttccatgccattcaggcatcagtcaaggagagtagggagtggcaccagcttaacacagaggtcaggacagcggcttcaaggaggcaacctgagccggcttataggactagtgggtctggcagtgaagagttggggtggggagcatcccaggtaggggagcaggcatgcacaggccccaggggaggtggtctgggctcagggagcaagaggctgcctttccctgtccaggattctgtcacctgaacatgaccctgcaggcacagatggtggccaaccttcaggtcacatggccgtcctcctgggctgatgctttcctggtgttgttttcctctagctcatttcttcttgggatctgtatcctggaggcaagggatgctgtagacccagctgtccctgcagccccttaggacagtggtggcagggcctgtaatctggtctcatgcattcattcattccgcaagcccagccccaggtctctgagtgccaccctagaggtgttaaacaaaggaggccaggcaaagtcccatctccctcagggcctaggcttgagatcacagcaggaggagccaaggagactcacgattaccctcctgaatcccttcagtcactcacaagtggcaatgctgggcaagctgagtaaaacaaaacccatctgcagaccagagtcagccaccttcccatctgtgtcaaggaagtgttcctgcaggcctggcgccggcctccgccccagggacgctgggctgaggtgttgggtctcccaccagggcctggaagacctgtgggcatgtgggaggaggagtcacattgcacaattgcagagtcccctccccaccgccctccactgtgccaccatcagcgtggcaaccagaggtctacactctcagggcaattgctggctgcctcctccagggtctccttccagttttatatgacatctgggacccctgggatcttcacccctaccaaggagcactgaagtttatacactgccctgggagttgggggtgatgtgatgtgtgggaagcttcaggccacaggtggggccaggaggagtgagagatggtgaccaagcaggggggactccaagctatcaccctgtcccattctaaaggagcatctgttcaggcaaggcaagcagagggccactagcagccaggcccctgaccttcccctggtggctttgggaacattcctaactatgcaccacagctggcagatcaggagtgggaatggcagggccacctgcagctgtgattgggtggctatgtgcgaattgagcacgtcagtcctccacacaaggcccagactgtgtgggcacctgccgcgggaactcctgcctcttggcctgtgtcctgagctttgggtgtgcagccaagcttgggatggggttaggtgaagcctcacctctctacctgactctctcctgtcctccagtgccaccgcatccaccggtcactcgccagccagttcaagtacgccctggtgtgggtgagtctctgggtggaaagcaaccaggggggtagacccaggacagcccctgggttaggcatgaagcaaggcattcacactctctgcgtggtgttcctgtccttcctgtggggattggcatgtctgtgtgtctgtcctccatagaatgtacatgccaacccagggtagacatgggccttccccacccttttttttttctggtttttttttttttttttttttgagacagggtctggctctgtctcccacgctggagtgcagtggcacgatcatggcccagtgcagcctcgacatctgtgcaaaagcgatcctcccacctcagcatcacaagtagctgggactacaggcacacaccaccatgcctggctaatttttcatggagacaaggtttcgctatctggcccaggctgtctcaaacacctgagctcaagtgatcctcccaccttgacctccagaagtgctgggattacaggcattagccactgtgcctggccctccccaacctttgagatcagggatggtcagacaactgcggacatcctgctgcctgaggcccccaccttatgccatggcatttacccttcaggacacacacgcccagggatatcttccttgaccttggccagtccaggctgaggtgacccctctgcccccattcctcacccagggcaccagcaccaagtacagtccgcagcgggtgggcctgacccacaccatggagcatgaggacgtcatccagatcgtgaagaagtaacggcgcctgccgggcctcccgcccacctgcctcgtctccctggggaggtggtcccactgggacacacaaacacccaaacagaaaaatacaaatacacgtaccccaggaaggggtccctcaagtctctgctatttacagaagtttcttcagtaggcagacgaagagtgtgttggggcaaaggggctcggttggaggcatttcccataagactgagccctctcatgggggttttgagtttgtagtgctgagcctgcatctgtgcctcccagccccctgcactgagggagcaagttgcccacatgcccgccagccagggcctaaagcagatggcatgctcagtgccaggctggtagctgggcctgtttgggtccctggaggctgtggctgctgtcatggcacctcactccctcagctcttgccagcttctctgacacttgggttgggggcccttccaggaggaaacccccttgggtgccccacacagggctctccatgatgggaaccagtggttagtggcttcaaaggcccagctgacaccctccacagcctaaggggtgtcctaaagtgcctccccctgtattccccctcccagggcagcccctgcccagcacaaaaccccaggaccctggctctgcacgcctggggcagggacttttgagtttaggatctgtattttctaagtccccagttctcctggctctcctttctgaaataaaggattgaaaacggttcctgttcagactgagaacactttgtaaacttgctgaacagtagccaggttgagtcaggtgggcacaggtcagacattgggcctgggggtcggagagggtgcagcctgggccccaaggcagacccaggccttgtgtggcaaggagactgcagggttcctcacccaggcacaggcaggctctgcccagggggttggtgttcgggggtgtcaggcccagactggcccctccggaggggcctggctgccaaggtgggcagcatcccaggaggcccttgtgaccatctgggctggcagggaggctctgtgagaacaaggtggcgggtcatttcctgttgcctcagaagtcaggagtagaggggctggcaggggctcgatgagtgcctaccgtgtgccagggactgtgccaggccccccacagtgttctgctgtcccccagaagctggtgtaggctgcacagtttgtgagtgcagaccccggatttaagacctctgagcagcggggaaggcttcctggaggaggtatgccttttgagatggatgcagcaggttctgtgaggctgccaggaggggtagagttcccgggggcctcgggccccgctggagtgtggagcaggcccatgctcagctctccaggctgttcgtggctcccctgtcagctgctcactcctttccagagacaaaacaggaataatagacatcattaaatatacatagggccccaggcggtcggcgtggtgggctgggcctcccttccccataacactgagctgctctgctgggccaaccgtgctcctgggccagccagaggacccccatgaggcggcatgcaggcggggagcaggccacagaacgcaggtaaggagaccttagcctagagtccttggggtctgtcactggccaccctcgcatcccaggctgcaggggtgataagggaaggggcagcagcagagctggggcctcgcccctaactcatcttgaggcccttctctgcctcactttgttcatctgtgaggggtgtgatgcccatgcagtcccctcctggcgatggtgggataccaagacaggcagggcctctgtggcttacctcggcccctctcctgactgtcctgatgcctggccatgaggccctaagtgagggtttctgcctggctggtggccattcccacttccactttacaggtaggggctctgggcccagggtgaggtagggaaggccttgagttcacagggtgtcagggtgagtccagaccttggattagatccagacctgttttgtccccaaggctggctggcaaagggtgggaaatgaggccagaggctgggggtcctcaggcagtgagggctcaggtgagaggctccagccactgggccacaagttcctcaccgtggatgggcttgttcctgggctagatctgtgtgcgcgtggatcagggcaggcactgcggctctgttatgtcctgggctttctggatctgtggtcaggatggttgcgcagtctacatttgcttgtgagagagcgagcaagggatcctgcagctgcgtatgcccaggtcagtgtgaagtggcagcttgcggtgcctttagggctggggaagctccctaagaccccccaaaggtctctgaccctcccatccccgcacctgggtaagctccaggcttgggcctcaccctgtcagccaccttgttctcatcaccctccctgatgatcacaggcaggggtctgcaccctcactcaggcccatgcccaggcagcagagttgcattcatctcccagctggcatccctgcagcctcccgggggtagtatggcctgcagctttagaagactcaggtacataggagccaaagacatgaatattcatctatctgtcccacacgtgtgcgttcactcattctccgtctttcttcctctccagcttagattccacagtttctcatttcggaaccctcctttggcaagaaagccgagtcgagaccctctccttcccactctgtccctctcctagacagctcacctgacctccagcttccatctcgccagacctgggtccgagcagcctttttgactctccactgcactgtcctgtagccatcccaagcccaccgtgtcccagaccaaacatggcgttcccatacccccggcctcacctcagagacactccccgcaccccccagctgcaccaagccaaccccaagactacttgtctccaccctcatcccagccccatctagcctctcaccagggccagcctgtttcacctcatcctgaatgtgtccgctgtacaccatcacagcatgctcccagctgtgtcattgtcccctctccattcttttccacatggcagcccgagcttctttttataatattttctaagaagccatgtgaggcagtggttgagactgtggacactctgaagccagactgcccaggcttaactccaccttcaagctgtgtcactcacataacctctctgggcccatgtcctcatctgtaaagtgggaagagtaaccacaccgacttcaggaggttgtagtgagagttgaggtctgtgtggcctggccgttctgagcacaggtcttgcagtcagggacacaggccccatggcttcctcactgtgggctctcggctgagggatctaacctctctaagatcaagcccttcatctatgtgagaatctagtgagatattccagaaaagcatttagtaccaagcctggcacatagtaaacatctggaaatgcgaaacagtgaccaaagtcccatccctttcacggccattgggctagtccctgcctgccaccctggccacctctcatttcacatgccctcaatcactctgctccagccataggactgtccttgaagcccctcttaccacctgacctttgcacatgctgttccacttgccaggaatactgttccttcttccatgttataagctccctcttatccttcagatcttggctcagggttgcgttgtcagcagaatcttcctggacctccagtgcagtgtttgggcatctgtgggtcatgccctgaccttcacagctcttcttgttgatgtgactctgcttaaagtctgcatccaggatgggcacagtggatcatacctgtaaacccaacactttgggaggctgaggcaggaatattgcccgggggcaaggagttcaagaccatcctgggcaacatagtgggaccctgtctctacaaaaaaacattagccaggtgtggtagcccacctctgtagtctcagctgcttgggcagctgaggtgggaggattgcttgagcctgggagcttgaggctgcagtgagctgtgattatgttactgcactccagcctgagtgatggaaccagagcctgtctcaaaagagaaaaaaaaaaaaaaaaaaaaaaaaacaaagtctgtgtcccctacaacacagggagctccatgagagcagagatcatgtctggttccacttaactctgcgaaccccaagtgccctgcacagtgcttggcacataatagatgcacaactaatgcacaagtaatatttaaggaatgaatgaatgagagacttgctccctgacacccgctctgtgcctgcacagaggatggggaccctgagaggaaggcaggacctggaacctaccagagaaggggcagcctcagctgactactatcctgaggtcaagcctgggacccagagaccaggagggatcaggtgggcaggacttgctgccagcagtcacccagacctcctcactcagagcagacaggcagcagcctgtagcaatgacgttggcagtcataacaacagctgcttgcccaggccagccactgtgcccagctctccgctatctcatgtaatgcccaggtcagccctggtaagggaggcatctacactcacagatgaggagactccaacgctgaggctgcatgacttgctatgggtcagatccaggagaggaatgagacctgacccagagctctgagccactgggctccacgtcccctgggctagagctgggcttgcctctctgagaggcaggttcttcatctggacaatggggctttgcagtggaaagatgcctgcctgaggctttgaggcaggacttgggcaagcccgctagagaatggtggcctctcagcctttcttctggacagacagacaaggctcccctacttggggcagacagaaggtatggctctgggaggtgctcttgggcctgaagggccagccctgccctgcttctccccagcaagtctctgacctctctctgcttcactttcaacaaatgtaacaaatgttacatgacactggggtgggggtggggttggacctgtgacatctcaggtccctgacattcttcctgagagcccctctaaagtggtgtttccactcagtctccaatccctttttttttccattttcacatatacacttttttggggggtcgtgggggacagggtctcgcaccgtcacacaggctggattgcagtggtgcaatcttggctcactgcaacctccacatcctgagttcaagtgattcttctgcctcagccaccacactgtgcatatctgtagctgggattacaggtgtgcaccaccatgttcggctgatttttgtatttttagtagagacagggttttgccatattgtctgggctggtcttgaactcctagcttcgagtgatccacctgcctcggcctcccgaagtgctgggactacaggtgtgagccagcgcacctagcccacatttacacttttaaatgttacattttttttggtttttgactcagaaatgcattcatatggataaaaatcaaactaatatagaaagatttacagtgagataactattctcattaatttcttatgtatcttttgctgtattattattatttttttttgaaacggagtctcactctgtcacctggaccggagtgcagtagcatgatctcagctcactgcaacctctgcctcccgggttcaagaaattctcctgcctcagcctcccaagtagctaggactacaggcacacgctgctacacccagctaatttttttgtattttagtagagatggggtttcaccgtgttgcccaggctggtctcgaactcctgagctcaggtaatcagcctaccttggcctctcaaagtgctaggattacaggtgtgagccaccacacctggcgctgtatttcttttgtttgttttgacacagagtcttgctctgtgtcagaggctggagtgcagtggcatgatcacaactcactgcagcctcaaaatcctggctcaagcgatcctcccacttcagcctcctgagtagctgggcctacaggtgcttgccacctgtaatttttcggtttgttatctagggacagggtctcgttatattgcctgggctagtttcaaactcctgggctcctcccatctcagcttttcaaagtgcccaggcatgagccactgctcctggctgcagtatttctaatatggaaataaaaaagcaaacacaagctgagcatggtggctcagtggctcatgcctataatcccagcactttgggaggatgaggtgggcagatcacttgaggccaggagttcaagaccagcccggccaacatggcaaaaccctgtccctactaaaaatacaaaaattagtcaggcatggtggtgcatgcctgtaattccagctactcaggaagctgaggcctaggaggtggaggttgcagtgagctgagatcgcatcactgctctccagcccggttgacggagtgagactgtctcaaaaaaaaaaaaaaggcaaacataagaatacaaacttatattcttagcacctcccctgacacacacacacacacacacacacacacacacacacacacacactcttcctacagaaaggcctcagtaaacactgtagtcaacaggctgatctgcagcctgcttcctgcactagcaggtcctggagatcgctccctatcaggacacagagatcgtccacattccttgttatagctgtgttgtgttccatcctggaatgcattgtggtgtactgcagcaatgagcagctctgtttgtgtgtccttacccataaggacgtgtaagagagatccccaggggtggattacttgcatccttccttccttccctccctcttgtcctttttcttttttaaaacaatcaatatataatccgcactccatacaattcacccatcaaagtgtacaatgctgtggttttagtatgctcacaagtgtgcccaccttgtgaccaccacagtcctgtcttttttttttttttttttttttttttgagacggagtttttgctcttgttgcccaggctggagtgcaatggcttcatcttggctcactgcaacctctgcctcccaggttcaagtgattctcctgcctcagcctcctgagtagctgcaattacaggcatgcgccaccacgcccagctaatttttgtatttttagtggaaatgaggttttaccatgttggtcaggctggtctcgaactcttgaccacatatgatccacctgccttggcctcccagagtgctgggattacaggcatgagccactgcacctggccctggtcctgtctttcttgaaacctcttccatcaggtgtaacttcccttgcccctgctactgtactgggaccattcttgtcacagtcacccctggagctctaaggagctgcatccattagtcagctctccattcttgactaacatgctcatctgtcatagcggtcccatctgtcatagcagtcccgccctcctgtgcagcccccaggaccccactccctcctgggcctctacctcctcctctggctggcttcgtggtgctcactcactgcctccttggctcctaagcactgcagccctgcggctcattccgtggcctctcttccctctatactcattccctggtgtcatcctccagagctgtggcttcaatgccatctagatgccaatgactccctaactgatgtcaccagccctggtggctgtgatggccccccagcagtgcccagtgcccaaagctggatcctgggccctacttcctcaatttgctctgtctgcagccttcctcatcctggccaatgacctgacggcctctccattctccctgatgttcagtaaggaaacttgggagccattcctgcaccctgcctcatccccatcatcaaatcctgtcagtcctacctgccacatgtccccagcatcctaccacttctccacactttaaccgctggcagcctggtgcaggaggacctccatagaagcttccatgctggcctccctgccttcaccctcactcctgcagccgcttctcccatagcagtagaggctgctatcaagactgaggtcgaggctaggcttggtggctcacggatgtaatcccaacactttgggaggtcgaggcaggcagatcacctgaggtcaggagttcgaaaccagcctggccaacatggtgaaaccctgtctctactaaaaatacaaaattagctgggcgtggcggtgtgtgtctgtaatcccagtttcttgggaagctgaggcaggagaattgcttaaacctgggaggcagaggttgccgtgagccaagatcgcaccatcgcactccagcctgagcagcacagcgagactctgtctcaaaaaaaaaagactgaggtcgaattccatcccttctctgccaaaaccctcctcccacggctcctgcctcactggcagtcgaagccaagccctcattgtggcccacaggccctgcacatgtgcccctgaactctgacctcaccacccagtgcacccccactgccctccagccacctggcctgtctgctcctccacctgcttgggactgtgcactgcccacaggctctctccatggccccatagccactaggccttccctgacttcctgtttaatgtcacaaccccacttcttgctgtcccttccacggcacttacgccccattatctgttactgattttccatgtttattggctttctctccacccacatatggtaactgcatgagggcagggtttttctctgttttgttcacagctgtgtcccagcacttagacggtgcctagcatgcagcacacttcccacagaggcttttgaatgaatgggtgagtgagtaaatgctggctcaggacccttagggaaaggggccaggctgactgaggaatccaggttggggtagcggtgggcaagcactggagaggccttggtgcctgttggaggcccagctgggctctggtttgcccagtggcttggtcagggccctccccctccaggcaggagcaggttgtggggttagcacgactatgctcctggctctgcccagtgtcctaagccactctaaacccagtgatgacccaggagctcagcgggcaggagggcctagtaagggaggtagctctggactcggccaggcctgggttctaccttcccaagccaggtggcctcgagcaagtcccttcatcttttgagtctgagtttcctcatccggagaatggatatactaatagctcatatctcacagacctgctgtgagagtcccatgagaccactgtgcaacacacctgactggggcctcactttggaaactggctccaagaggagctggggcagttgttgatatctccaggctcagaaagaatgtctcggctgggcgccgtggctcacatctgtaatgtcagcactttgggaggccaaggttggtggatcacctgagatcaggagtttgagaccatcccggccaacatggtaaaaaccgtctctactaaaaatacaaaaattggccaggcgtggtggcacatgcctgtaatccaagatatttgggagactgaggcacaagaattgcttgaacccgggaggcggaggttgcagtgagccgagattgcaccactgccctccagcctgggcaacagagcgagactctgtctcaaaaaaaaaaaaagaaagaaagaaagaacattgcccctgtccttcatttttcctcaagcgggcaagagccactgcccaaaaacagaagggagagtgggcagcccctcaaactcctgctgtgcaggaggcccacttcctgcacgtatcccctaactcgctccaaaagccctccatccaatttctctggtttccatcaagccccactccccatccctgtgagactgcctgcaccaggcaccaacagcccctggtgcaactcctctgagtggctgggcactgactggctccaggtgaatcttggggaggaggagcaggaagaagaggaaagtgaagagccagagaaagtgagcagggggaagaggcagacagagagggggagacctcacttgctgcatggtcccctctctgctcctgccacttacctgggaaggcctcaccctgtccctgtttcacagctgagcacgttgaggctctgaagccactgatctgagggcgtggagctggcaagtggcagaaccagggccagaaccttgctgctttggggtctcctatgctaaaccttaaacaaccaaagaattagctctgggaccaaaagagtgaaccagagttcagtgagttgaggtccatcttgaggaggaagaggaggaggagagctggttctgaggcttcaggtctcagagctgccactccccacctccgctggcctgcccagtttttcccaccccctacctcttttagtgcaggttctcaaaagtgagttagactggccaccaaccagactttggacatgcagccttaggtcaggccatatgaagcaatcagctatgcccagagaaggcagtaaccacatggccacagcctactcagccagggcagaaagtaagaggagaggacagggctaggcagggaccccagaaaggagccagcaggaggcatctccagttacccagcagctccatcaggtcttgcttccttttggtgaaggagatggggcatagcttatcactcccattcttcagaggaaactgaggcccagagaggacaaggactttcctggacccacacagccagtcagtgacagagcctagggtctgagccaggcctgacccaacctccatttctgcctctctacccctgcccccgccccaacacacacacacacacaagtggagttccactgaaacgcccctccttgccctgccttctgagccggcagcctggctccccaccccatgtattattcagctcctgagagccagccagctcctgttacactgaccgcagcccagcacctgctctgcccattcccctcctcccttgcctaggacctagagggttcaaagttctcctccaagatgacttggtgggctttggccatcccaccctaggccccacttctggcccagtgcaggtgtgctggtgatttagggcaggtggcattccatctctgtggctcaatgtcttcctctgtgaagccgaagtgacccaagggctcccttcatggggttgagccagctgtggcccagggagggcctaaccaggatgagcactgatgttgccatgacgactccgaggccagaatgtctcccccagcacaggcctcataggcaggcttccccatcctggtaaacaacacccacacactttctactactgctctagggtgaaacccaaggcgctctagaggagatgaattatggatccgccctcccggaatcctggctcggccctccccacgccacccagggccagtcgggtctgctcacagcccgaggaggccgcgtgtccagccgcgggcaagagacagagcaggtccctgtgtctccaagtccctgagcccgtgacaccggccccaggccctgtagagagcaggcagccaccatggcgaaggaggaagatgaggagaagaaagccaagaaagggaagaaggggaagaaggcaccggagccggagaagcccaaacggagcctgaaggggacgtcgcggctgttcatgggcttccgcgaccgtacacccaagatctccaagaagggccagttccgcagcgcctcggccttcttctggggcctccacaccggcccccagaagaccaagcgcaagaggaaggcccgcaccgtgctcaagtccacgtcaaagctcatgacgcagatgcgcatgggcaagaagaagcgggcgatgaagggcaagaagccgtccttcatggtgatccgcttcccaggccgccgtggctacggccgcctgcggccgcgcgcccggtcactcagcaaagcgtccacggccatcaactggctcacaaaaaagttcctcctcaagaaggccgaggagtcgggcagcgaacaggccacagtggacgcctggctgcagcgctcgagctcccgcatgggctcccgcaaactccccttcccgtcgggtgccgagatcctgcggcctgggggccggctccggaggttcccccgcagccgcagcatctacgcgtcaggcgagcccctgggcttcctgcccttcgaggacgaggccccattccatcactcgggctcccgcaagtcgctgtacgggcttgagggcttccaggacctgggcgagtattatgactatcaccgcgacggcgacgactactacgaccggcagtcactccaccgctacgaggagcaggaaccctacctggcgggcctcggcccctacagcccggcctggccaccctacggcgaccactactacgggtacccgcccgaggatccctacgactactaccaccccgactattacggtggcccctttgatccggggtacacctacggctacggctacgacgattacgaacccccatatgcgcccccgtcggggtactcgtctccttacagctaccacgatgggtacgagggcgaggcgcacccttatggctactacctggatccctatgcgccgtacgacgcgccatacccaccctatgacctcccataccacactccctacgatgtaccctactttgatccctacggagtccactacaccgtcccctatgccgaaggcgtctatggcggtggggacgaggccatctacccccccgaggtgccctatttttacccggaggagtcggcttcggcctttgtgtacccctgggtaccaccgcccatcccgtcgccccacaacccgtatgcccacgccatggatgacatcgccgagctggaggaaccagaggacgcgggcgtagagcgtcaggggacctccttccgcctgcccagcgccgccttcttcgagcagcaaggcatggataagcccgccaggtccaagctgtccctcatccgcaagttccgcctcttcccgcgaccccaggtgaagctgtttgggaaggagaagctggaggtgcccctgccaccctctctggacattcctctccccttgggggatgcggacgaagaagaggacgaggaggagctgcccccggtttccgctgtgccctacggccaccctttctggggcttcctcacgccgcgccagcgcaacctccagcgcgcgctgtcggccttcggcgcccaccggggcctgggcttcggccctgagtttggccgccccgtgcctcgccctgccacctcgcttgcgcggttcctcaagaagacgctgtcggagaagaagcccatcgcgcggctcaggggcagccagaaggcccgggcgggcggccctgctgtcagggaggcggcctacaaacgcttcggctacaagctggctggcatggaccccgagaagcccggcacgcccatcgtgctgaggagggcccagccacgcgctcgcagcagcaacgacgcgcgccgcccgcccgcgccacagcccgcgcccaggaccctctcccactggagcgcgctcctgtctccgcccgtgcccccgcggcccccaagctccgggcccccgcccgcgccgccgctctccccggcgctctcgggcctgccccggccggcctcgccctacggctccctccgccgccacccgccgccctgggccgccccagcgcacgtgccaccggcgccgcaggccagctggtgggccttcgtggagccccctgccgtgagcccggaggtgccccccgacctactagccttcccagggccccgaccctcgttcaggggctcccgccggagaggggcggctttcggcttccccggggcctctccacgggcgtcgcggaggcgagcttggtcaccgctggcctcgccccagccctcgctgaggagctcgccgggcctcggctactgctcacccttggcgcccccgtcgcctcagctgtccttgcgcacgggccccttccagccgcccttcctgcccccggcccgccggccccgctcgctgcaggagtccccagccccacgccgagccgctgggcgcctgggcccacccggctcgccgctgccgggctcacccaggccgccctcgccgcccctggggctctgccacagcccgcggcgcagctccctgaatctgccctcgcgcctcccgcacacgtggcggcgcctcagcgagccacccactcgggctgtgaagccgcaagtgcgcctgcccttccaccgaccgcccagggccggggcctggcgggcgcccctggaacaccgggagagcccgcgagaacccgaggactcagagacgccctggactgtgcccccactggcccccagctgggacgtggacatgcctcccacccaacgcccaccctccccctggccaggaggtgcaggcagccgccgaggcttttccaggccaccccctgtgccggaaaacccctttctccagctcctgggccctgtgccatcccccaccctccagcctgaggatccagctgctgatatgaccagggtcttcctgggcagacaccatgagccggggcctggacagctcaccaaatcagctggcccaacccctgagaagcctgaagaagaggccaccctgggggacccccagctgccagcagagaccaagcctccaaccccagcacctcccaaggatgtcactccccccaaggatatcactccccccaaggatgtcctcccagagcaaaagacattaaggcccagcctctcatacccactggctgcgtgtgaccagaccagggccacatggccaccatggcaccgctggggaacactgccccaagccgcagcccccttggcgcccatcagggccccagagcccctgcccaaggggggtgaacggcgccaggcagcccctgggcgttttgctgtggtcatgcctcgtgtgcagaagctgagctctttccagcgagttgggcctgcaaccctgaagcctcaagtccagcccattcaggaccccaagccaagagcctgtagtcttcgctggtcctgcctctggcttcgggcagatgcctatggaccctggccacgagtacacacccatccccagtcctgccacctgggccctggagctgcctgcctgtcccttaggggctcctgggaggaggtcggcccgccaagctggcggaacaaggtatggaggcacagattacacggagggtttgagggttctggcctaggaaacagggcaagagagacagcctgaggagccctgtgcaaccttggagagaggctgcttgctggggcctcagtctctgggtctgtaagttggggagaacagcctggacctcccagaacctctggagggttgaacaaggggatgcccagcacaggcaggcccaggacagagacgtgggaaactgcttccaggtcactctggggaaggatctttgttcatattcggcttgggccctgggcagccctgccctgatccaatctggatgacaggtctggcccctaacttcccctcagagattttggccaagccagatgtgaaactgccggacatgcctatccatcctgttccaccgcacatccaggtctctgcagttcctcctgcctcctactgaccctcccccaaattaaagcctcctgtttcctcagggtttttgctgccctttgaagtcccctgggctgcaggattctggaataggtcagggtgaggggctcaggatccaaacttccagactcctcattgcacagagggaaaactgaaccaggagtccttctggaaccccatgaggggtgcagggtaggcagcccttcggatgggtgcccagcccatgcctggctgccacactcaaggtggaactcgagcctgatgctgggtggcccttggctgaggtgcgtggtcaccggagcctctctcaggatgccggggtggtgggcggggcaagcaggggcagcaggtgcgtctcagcctctgcagaccatgcctggcggagcaggcagccagccgggcccaacaatggcaaccggggcagcctggctgctgagggggccctggccccggcggcggatgccccgcgctgtgtgggctgcagcgttgcgggagcggggcgcagggcgtctaggggtgaggggcaaggatgcctgggtcctccttaccctggaatacgtgagtggctgaattattcagggtctgcggctgctggcaagcacgtgggcagatgggtgggccggaggccagggccgaaagggtgatactcgctgtgccctacttagcagtccagcgacaggcatgcagggttccttcctggtgtcctctttcctcgcctgctcagggtgcagctgggattggaaaggctgagggtgtacacgtgtgtgctcccagtcatgtggatcctgcgcaggcctgcatgcctgagcatgtgtgcaagtgtgtaccacagccaaatgacgaaagctagtgtatggggtctgagcagatgtggcatccctgggggtcagggttgtttgcccaccctctgcccatgtgcacagacgtgtgctcacagaggagaccctgcagcccaaaggtggcatcaggacttccattcaccagacccccagcatagggagggacccagctgtgcgcccacatgtatgtgccaagtggacaggtagagcatgtgcctgcacaccgtgtgcctccagccgggccccacaggcctgcgtatgtgcccacaggcctacaggaacacctgtgtgcctgggagttgtatgagctgtaaatgccattgagtgtgggtccatatgcaggtgtccacgcattttccccaggatgagcatggggttgtggtgctaagacagtctccatctctgccctcctagaggccccatgcaccaggtcacaagtgtcctttgagttgtcacacaagccaacatatggggtctgctggtgctggaagagttgcggttgggagggagctggcccatgcgcccatgtacctgcatatgcctttgttcaccccctagggcaggacacttgggagctcatgggagggcctgcctgggcactgagggtatgcgtgtgtctcatgtgtgagggtcgcatgcaggttctgggggccacagcattctgtaatgaggagacctgcaggacccacctggccttggggttccctccccaacaatggtagcaggccccaggtatgaccaagccaggggtcagtgggggaggggggtgcccttcaacctgcagacacagcctctctctctcacacagatgcactccatccgcaacctgccatccatgcggttccgtgagcagcacggggaggatggtgtggaggacatgacacagctggagtgagtgggcagggccggcggggtcagcaaggggtcaccatggggtccccaccctcccagccagagcagctcctcctgcagttgcctctcacctcccaggacattttcagagcctcagtcatgaagtgtcacaaagactaaatgtggtgtgctttgtgagttagacggactttggttcaaatcctagccccaccactcaccagctggcagacgttgcacaaatcgctttgtttctctgcacctcagtttctcatccacaaaatgggagtgggatggctgttgtgaggatgccagcacattggaggtactcaaaacatgagggccgtgttggtcagcatcattatctaatcacagtgattacgtaagagtgtcccccaaacccccaatgaagtaggtacaatgattatcatacccattggacaaatgaagaaaaaggcacagaatagggaagtaatttgtccaaggtctcctagctggttggtgtcagaaacaggacttgaattcaggcctatctgatcaaggcactgcactgagttggggagggagacccatgccagaaccagccctgggggcactgacggcttctctctgtgtccttctagagacctccaggaaaccactgtgctgtccaacctcaagattagatttgaacggaacctcatctacgtaaggcctggggctggccctgccctgggcctaggtcaggaaggcagctgcctcctggggccgggtgggacgcacagatttctcttgtgggccctagcccctgtggcctctgcctagaatgccagagcctagaactaaaatctgaagtcttaaaacacagtcttagaatggtggatgccagaggccgggcacagtggctcaccctgtaatcccagcactttgggagaccgaggcaggtggatcacgaggtcaagagatcgagaccatcctggttaacacggtgaaaccccctctctactaaaaatacaaaaaaaaaaaaaaattagccaggtgtaggtggtgcatgcctgtagtcccagctacttgggaggctgaggcaggagaatggcgtgaaccccaggaggcagagcttgcagtgagcggagatcgcgccactgcactccagcctgggtgacagacagagcgagactccatctcaaaaaaaaaaaaaaaaaaaaaaaaaaagaatggtggatgccagaggcagaaagctggagacagagaatccagaaatatgtgacacccccaccatctgggacctgacagatagaacttccagagtcctagaatccatagacctggaccccagagtggggatggccagaggggtcagaggggagcctctgacctgagaatgacagaacagagggccaggggctcagtgccagtgtggaagacaaggacacccagaagggctctggccacatcaggatcccctgagttccccaactcctcactctaggcagtggaggtttgccctcaacaggagccagaagttcctggagcctgggcccaaccttgaacaaatgaagtaggcaggagcccacccaggatcgtggctgtggggtttgctcactccagactcctctcagctcagcctggtgcagtgcctgagattccactgttagagcacgtagcccagctagctggtagagggctctagatgggaatcccgagtccaggcagccagatatctgtccggatggaaacagggagccaggctcccagcataggggagggagggacatagaggtctgcaaggagccacgacgctgaggccaccgtctgcccagcagacatacattgggagcatcctggtgtcggtgaacccataccaaatgtttggaatctatgggccggagcaggtgcagcagtacaacggacgggccctgggagagaatcccccgtgagtgtctcgggggcgctgccctggggtctcttgggcccctctttcccctgctctgggagcctggatcccggctgcacctgagccatgagtcagaggtaatggggaaaggcagcccacctactcaatctgacagtctctccccaggcagggccgaagctacaggttggaggccactgtcgttcagaccaggatgggggtgggagcattcccccaacagggtgaggggtgggcaggattggctgtttggctggatacggatgctccctgcccaatccctgggaggtgtgggagcttagaggcaggggccagctctaatgacctgtctccccaggcacctctttgctgttgcaaatctcgccttcgccaaaatgctcgatgccaaacagaaccagtgcataatcattaggtgagtgggctgcctttatgtgggggataaatgggggaccttaggtagcaggcctgcatctggccagaactgctgtgggaccttggaagattgcctggtacctctgggttggcccaccgtacatatcctcttgcttcatgatgggagtcagggtgccccagaagaggcagcgaaaggttggagctcactctgcccctttgctcggtcagtggagagagcggctctggcaaaactgaggccaccaagctgattctgcgctacctggccgccatgaaccagaaacgggaggtcatgcagcaggtgagtctacctgtctccccaggaccctaggctgaacaccctttgataagcacacctcatgtactcccgaagaggcaaggctccttggcccaccaggaagatgaggaggctgagttccagaagggggccttgcccagggctgctttttctgccacccttcccaggggtgtgcctgaggggtgagagttcctgcctgtctgtgtttctgtggcagctcctgcttccagccctccgggtccagttcagagtggagaccacatagggaaggggagtccacatagggaaggggagtcatcccatctctcccacctggcctcaccttcctggtcatggccctggggccaccatattctcacacccagaagctatgcagcccccagcggtcaagaggcagggcaggcctgagtgtgggttaggggtggggtgggggaggcagtagatgccaggccagagtctgaaggattggagctttgctgacaaagacagtgctaagccctctgagcctgagaatggtagaactgcatccgttccctcagtaaagatctactgaagacctactgtgtgccagtcccaggctaggcactggggaggggtagcggcaactcaggcaaatgttcacacccttatgggaacttcattctagtggtggaggtgggaagaaaaaaaaagatatatatatatatatatatatatatacacttatataagtaaattatgtgtatgtgaaagggtaggtggtgagttgtggaggaaaaaagtgaagagaagggtggcgagtgttgggggttgcaatcgtaagtgtggtggtcagggtaggctgtactgagaagacaagagagtgggctctaggaaagtctaggggaacagtgaagaggcagagggaggagcgcctgcactttgaggtgcaagcagattgggtccaggtgcaggtcaaagccagccagcaacctacagagaagacagactggggtgtgagagggagaactgtcggagggtgaccccagacattcggtctgagccacaggcagcatggaggcaggctgggcagtggaggaggagcaggtttgttgagaagaggtgtctgctaggcatctacacagagatggcagggaggtgatggatgcaccaccagcctggagctcaggagaaggtgggactggcctgccagctcagactccagaaccacagacccagacttccccaaccctggggcccacaaaggtttgcacatggcacaatgtcctagccaggggcgagcccagcaaggtgatcctgggggcgtaggtggaggctgctcaggctttgcagtcaggttccagcctggcctggccccctctgatgcctgccttggcctgccagggtctcccatcccagcccaggcctcctgatgaccaaacagatcatcccttgctccagagttttcaaaacctttcaggtcagacttgtggaatgactaggtaggtaggcagggaaagaagtaagtgtacctcgtgcacctcctgtggccaggcacagtgctgggttccttcagttatcgtcacaccggagctttacggcaaccctgggaggtaggtacacttgtatccatttatagatgggaacactgaggcctaagaagggaggagtgaggtggtgcaggagctgagatttgcagtccatggcagagagctgtcagggaggacggatggagctgtggatgtggctgagtctgggagtttgtgtgtgccaggcacacagaatgtgtgaggatgtgcctgccagctgtgatgaccatggggctcctttcctagacatggctcttccctcctcagataatcaaacagtccagttcagttttaggcatggctggatccagaatcttaaacaatgtttcttgtcttggctccaccctcccccatgtataggcatcatcctcaatctgtctcctattggtcagcaagctggcaccataatgatcaaccctcccaacatttcagaaatgaaacattcagagctccgtctcactgggcaagttttggtcatatgtcctcactggagccaaccacgtagcacagggaatgctctgccctgactggctaaggcctggaccacaggttccacccttctggtgtttacccactccatccgctggctttatgccctgctgtatgctgggcaccgggaacagagaagcagccaacctgtcctcaagggcttcccagactaagggatagtacacaggaaagcccaggcagaccttgacttattgagcaatcacaggccagccccatccctctctggacctcagtttactcctttatgcaatgggtgcagtatttcctggactaaatgggacagatggagggaactggccccatccccaaaattacaggtattgtttctgtggtgactggacctcctttgcttcttccctaaaagattatcctgaggaagtgcctcagctgaagaaagtgccacgtacacactaggcccatgctcatcactcgagtggactctggagtccctgggcatgtcatttcacctctctaagcttcagtttcctaatctgcaaaacaggggtgatattagtacctacctcatgggattgttaacaacggcattatcagggcaatgtgtctggcacacagtaggtgcttaaataggtgggagcttgtgatcagccatggtcacccctgggcagctctgcccgtgagatggtattccttttgttttttgtttttgtttttgtttttttttagacagtctcactctgtcaccaggctggagtgcagtggtgccatcttggctcactgcaatgtctgcctcccaggttcaagcagttctcctgcctcagcctcccaagtagctgggactacaggcgcccacgaccacgcccggctaattttttgtatttttagtacagacagtgtttcaccatgttggtcaggatagtctggatctccgggcctcgtgatctgcccacctcggcctcccaaactcctgaaattacaggcgtgagccaccatgcccagccgatgctattcctttttccatccctttagcagatatttttgagagcctattaagcaccaggtctgtgtagacgctggggactcagagatgtgcaaacagtagatccgtgcctgtaggatttgacattctagtggggagacagacaataatacccaagaaaatagagagtttgccaatggggctgagggctactggagagagaattctggtggccttcctgtgagaggtaaggggttggggggtggggcatgcaggtgcgtgggagcagtgacttccaagcagagggaacaggagatgccaatggtcagaggcaggagtgggcctgggtgtcagggaacagtgaggaaggccagggaggatccttggctggtggtagccatgggggtggggagaagaggacatccccagagctgtttggaaggcaaactcagcatattttcataccttggagaccccatggcagtccccaagcctggacccctggggtctctgagcctcacaggtttttactagtccctccctggtctgaggctcctagtctcctggagagagtggtggtcggtcctgctagtgactccattctgttcttgtctgtctctttgtcctccctcctggacgctcttgaagataaaggtactcagtgtgtgtgtgtgtgtgtgtgtgtgtgtgtgtgtgtgtgtgtgtgtgtgtgtgtctgtccaggaaaatgcgtgtggatgtgcctgctcctgtgtgggtggagggacaggcaggaaaggacatccaaaggcctgtcctaggcagggctggggcttgtggtcaggggctgctgtggggggccatggaggctggaatggggaagcatggggcttgctgtgtgggagttgggcagcatggggtgggaaacactggggggcactggagagacctcaggattctctagggagcccacctctggtcatctctcataaagggaggtccttgggaaggctcatgtctgggtgtccccagctatgccccccacccaggcccccagaacagtgcctagcccctcaattcccacatctccttctggagtccagatcctggaggcaacacccctcttggagtccttcggtaatgccaaaaccgtcaggaacgacaactccagccgctttgggaagtttgtggaaatctttctggaagggtgagttgggacagtggagggcctcccaaaagccttgcagtgtcttccatgtcctgccacagcccctcggagccaacaccagccctcctaccctcactgagagctgactgtgctccccaccccaggggcgtgatctctggtgccataacctcccagtacctgcttgagaaatccaggatcgtgtttcaggtgggccaccccctcccaggcctctgtgttgggcagggtcggggtgggaggtacagatactcagagcctggcccctggtagggctaggtagacgtcaaattaatgaacgaatacatgcgtacatgtgtacatgtgagcccaggacctcccctccccgaccctcctccagccacggtggctcctccctgccccgcagcacacaggcacgctcctgccagggcctttgcaccttctgttccttccctcaggagcacttatccttcaggcacctgcttggccaaacccctcacctcctccaagtctcccctacaatttcacccactcaggaagctccccatttaaaaacgcagcccctctccatcccatcagagcccctaccccgtccactgctttatttctctccagtgtacttttccctgtctcatatattttatgttttaagcagttatttgctgagtgtctgtctccctagctagcaggtgggctccatcaggtcaggggcttctctctacgttgttccccactatgtcccaagggcctaggacagggcttggtgcacaggaagtgctcagccatcaagaagctctgtgtgtgcacatgtgggctatggacacacatgtatgcaggtgtgtgtggccggtacacataagagaagacgggtcccttttctcttatttctcctaaccaaataaaatcccaccagaaccctctcaaacttcaatcataccagggcacctctgcttctgccctcacccgcagctggcaccaggctgggagcctcacccatcacagaggcgcgtgttctcatctgcagcccactgtgtgcatgtgcacttgtgggcaggcttgggcttgtatgtgtgcctgggggtcacctaggtaggtggctcccttctctgtgcccacctacccactctacaggccaaaaacgagaggaattaccacatcttctacgagttgctggccgggttgcctgcccagctcaggcaggcctttagcctgcaagaggctgagacctactactatctgaaccaggtgagtgccagcaggcatctgaaggcccctggccctggtcctcccaccccgacgcccctggctgggccttgggagccgagttgtgagtgatggagtgtgaaggtgaaggagatttggggagggtgagtttggatttaagacatctcatggcagtgagggggaccaggagtcttctgggtccaaagcggaagcaggaaaggcctacctgacttcatttctctggaacctggaacagaaccaaccagtctagagtttctacacttcccctctctgtgcctcagtttcctcacctgtaaaatggggacaacatagtaccactttgcagggatgtagtgaggcttagatgaggaaacgcatgtaaagagcttagcacagggcctggcatgcagtacatgctcagtaaacacttgctactcttttcattactatcactgggcagctgcaaaggtcaacaggtgacaacccctgccacacattgcacttagaatctatgaactccgtcctcagccgtgctcagagcctccgtgcccatgagagtgaaatgacagcttgagtgaccaactcaggccaccacactactggtcagggcagagcaggacctggagggctccccagccccacccaagctccctgaccctcagcctctgccctcatgcagggtgggaactgtgagatagcaggaaagagcgatgcagatgactttcgccggctcctggctgccatggaggtgttgggcttcagcagtgaggaccaggacagcatcttccgcatcctggcctccatcctgcacctgggcaacgtctactttgagaagtatgaggtgaggggacgccacagcctgccatggggcccgcaccctctggacttggccgtcttttccaaggccttctctgtttccctttcagattacactatgcacatatcacttgttcctgtttttttcttttttcctttggggttgttcatctttttcctccttatatatattaaggaaatcagccctttgtgtctgatatgaattgcaaatatatattccagtttgtcatttatgttttaactttgtttacaatgttttttggtgggtttttattggcggggaggggtctcactctgtcacccaggctggagtgcaatggcgcagtcttggctcactcctgttggctcactgcaaccaccgcctcccaggctcaagtgattctcctgcctcagcctcccgactgcctgggattacaggcacacaccactaccgccccactaatttttgtatttttagtagagacggggtttcaccatgttggccaggctggtcttgaactcctgacctcaaatgatccaccggcctcggcctcccaaaatgctgggattataggcatgagccaccgcgcccagccctttggtgtttattttattttattttatttttatttatttattttttctttgagatggagtctcgccctgtcgccaggctggagtgcagtggcgcaatctcggctcattgcaacctctgcctcccaggttcaagcgattcccctgcctcaacctcctgagtagctgggactacaggtgtgtgccaccacatccagctaatttttgtatttttagtagagatggggtttcatcatgttggccaggatggtctcgctctcttgacctcgtgatccgcccacctcggcctcccaaagtgctgggattatagccgtgagccaccgtgccccggcctgttgggttttttatgcaaattgttttaaaattatttttagatagttcatttatcaatattttctagtacatttaaattttatatttgaaattttaaactttttcatttttggagaaacttcctaaaattgtaacagccttcttccataactttttctaagaccttttatggattttgtgagttttaaaaaacacttaaatctttgatccatccaaatttatcccagtaaggtgtgacgtaggaatccaacttttttcccaggtggttactcaattgtcctaatctcttgatttgaaaaatacatctttattagctgggtatggtggctcatgcctgtaatcccaacattttgggaggccaaggcaggtggattgctcgagcccaggagctggagaccagcctaggcaacatagcaagacctcatctctacaaaaaaaaattatttttaaaaaagaaagaaaaatacatctttgtcatgtgctaagtttatatatacatttatgtctaattccagacgttctattgtgctttgttaatctatttatgtactgtgtctatgactacactggtttttttcttttaatcggcttttttttctttttattttttgagacagggtctcactttatggctcaggctggagtacagtggcactttcatagctcactgcagcctcaacctcctaggcccaagcaatcctcctgcctcagctcctgagtagctgggactacaggtctaggtcccatgcccagcacattttttagacagggtctcactatgttgccaggctggtcttgaactccctgcctcattcgatcctcccacctcagcctcccaaagtgctgggattacagacatgagccaccgtgcccagcctgtttctgttttttattttttcgagacggagtttcactcttgtcgcccaggctggagtgtaatggtgcgatctcagctcactgcaacctccgcctcctgggttcaaacgattctcctgcctcagcctcccaagtagctgggattacaggcacccgccaccacgcgtggctatttttgtttttttaagttttttgagatggagtttcgctcttgttgcccaggctggagtgcaatggcacggtttcggctcgccacaacctccacctcccgggttcaagcaattctcctgcctcagcctcctgagtagctgggattacaggcatacgccaccacacctggctaattttgtatttttagtagagacggggtttctccatgttggtcaggttggtctcgaactcctggcctcaggtgatccacccgcctcagcctcccaaagtgctgggactactggcatgagccacagtgcccggccctgtttttcatatgaactttaaatttagcctatctagttcaaagcacattcctgttggtattttgcatagacggatgcacaggaggtggcctcagtggtgagtgcccgagagatccaggccgtggcagagctgctgcagatctcccctgagggcctgcagaaggccatcaccttcaaagtgaccgtgagtctgtgggcatctggccttcgaacaaagctttctaccagggcctggacagagctgcttgtgccgatcctttgtgggcagcctctccctctctcctgctctctctgtccctgggtcaggcatggaggggagtaatttcagaccccagagacatttcagattccagtctcagactgttgcataggctgtttcctctacccggaatgctcttcctcttttcacacctactcatcctttaagaccctatccaggtatcccctcctctaagaagccttccctaatctttggacgggtcagtgcctcctctggtctttcacagtcctaggcccattctcccttcccagggttgatctcattgtatctgctgatgcctctgtctcccccattagacctgcagtccccactactaccagcatttccaggcagagtcagagtgggggcaggggtggtcctgcctagtctctgtgtgcacagtcacaacatccctccagcctcccttctccatgatcccactcccttagtcccctgggggctttccggaggcagagtggccagcctgatgtcactcaagggctgtgcccgtccctaggagacaatgcgagagaagatcttcacgcccctaactgtggagagcgctgtggatgccaggtgaggccacgccctcccctgcctgagccccgaggcccagcaccccaccacggtgtcctgctcacaccagcaccacctctgctccagggacgccatcgccaaggtcttgtatgcactgctgttcagctggctcatcaccagggtcaacgcgctggtgtccccaaggcaggacacactgtccatcgccatcctggacatctatggtttcgaggtggggccgtgtaggaggctgaggggcgggggacataggcaaggtctcgcctccctcaggcgtctcgggctgcccttcccatccctttctgtgcctgcagcaggtgccatcctcccttcatggacccctccctgtcaccatctcccttgtctccttccattttctttactcaccacaagtactcccaaggcctctgggccaggccctgtgctgggcaataccagctgcccagaaaggaccagccagggccctgcccttggggagcttccaggtgaggctgggtggggaaggcttcctggatgaggatgagacactcctgagacccagcaaaggcactgtaggtgcagggaacagaatatgcaagggctgggaggggtggcgggtcatgaggtctgggactggacttcgtgtgttggggggtgactgttttgtgagtgcacagcaaaggaagtggtgagggacagggcaagatcaccatgcagccatcacaggcactcacgtggcacctgttatgtgccaggtgctgtttaaagcactttgttaattcacttcatccttacagcaaccctatgaggcaggtactgtcagtatcctcattttacagatggggaaactgaggcatggggctgttattcaaggttatgtagctagaaaatggcagagccagcatttgaacccaggcagaaggccccagagccttggccttcaggcactgcctgtgctgtcaggacagagcctgtcagattctgtcctgggtgcagcaggagctgtggagggttgtgagctgagggcctgtggctgagctccagctttttgaagttgccaccagggaaggtaggggcaaacaggctggtggccaaggaaggaccagtcccagcacccccatccacctggcaggacctgagcttcaacagctttgagcagctgtgtattaactacgcaaacgagaaccttcagtaccttttcaacaagatcgtcttccaggaggagcaggtgtgtgggccccattaatactcctgtccctgtcttgactggccagtggacctccttggagacagatgaggatatactggttgtttaagggcaattctgacatcagtagacagtagagggaaaggcattctaagctggggaccagcccatgggaaggcctctgttctggagggaaaggtgctgaggtgctgtgctcagagaggagtccccttggtgggggtccttcttctcctctactgggctgtcccaggcagagggagcagcaggaccctgagttggctcatgctgccttattagggggtgagctccctgttctgggaggtatgcaagcagaggtgctgctggccaggctccttcagattcaacatgggagggagggtgggtgggccctggacagggatgggaggttgagctcctgctgcccactgcctgcaggaggagtacatccgtgagcagatagactggcaggagatcacctttgctgacaaccagccctgcatcaacctcatctcactgaagccttatggcatcctgcggatccttgacgaccagtgttgctttccccaggtgagccgcaggcactgtgtgagcctagtcaggtcacagatctctcagcctcatgtcctcatcccaccctgactccttcattcctctctgctctggcctgagtcaggcagtggggggttgggacacccgacctactattcacaacctggggtgattgaggccagatgggccgctgtgggtgttcagaagagaggctacaccagtctggaaagccacagaaggtttcctggagtaggtaaccttggaattgggcctcaaatcctgattgcaaaacacaagggtggaatggcagtgagatcaatagagtgcaaaggcagttggcctggaggggaggcagttaggagctcacccagctacacctatcttcaagggaccactcaggcctccagtgcctagctaaggcactcgccttctgacccagggagatgggcagccatgggaagctgtgagttgttcctctctggtgctcagttgggagcagtcggggatagtgaggttgccaccaggccaggaacagggtgtccaggcctcctgcccacccactgatccctaaattgcccccaggctacagaccacaccttcctacagaagtgccactaccatcatggcgccaacccgctctattccaaacccaagatgccgctgcctgagttcaccatcaagcactatgcaggcaaggtcacctaccaggtgagccctaagacagtcggcctggacgctggtgctgcagtgctgctagctgttggagacacagaagcacaacactggccccagacattcacagccaggtccaattctggctctgctgtgccccagctctgtgaccttgagcaaattgcttagccagtctgagcctcagttctctcacttggaaaatggggtaataatagtgcccaactcatggggcaggtgtgaaaaatgtagggtgggtttgataaagagtagctcatcaatagtgacatcactatggtcaccctcatcactattatctgaggcacattcctgccctggaggtgtctcaggctaggattccatgcctctgtccccatccgggccttacttttctcatctgtagaatgggcacaggacaatgtccttcactgagggtgaggccaagacccaggttggtcatgagaagccatggcgaatgctcccctcccccaggagtagggagaatggtgggggctggaggggtggggaccatagaagtgaggaggatccagtccctcctaggatagacagagagacagaggccaggattacccaggccattgttccccttttcaggtgcacaagttcctggacaagaaccacgaccaagtgcgccaggatgtgctggacctgttcgtacggagccggacacgggtaagcctcgcctcccaccgctctggccctgcccccaggcatgtccccacccccacacccagcctgccttcaggcctgggaccgtgttgccacgtcctggctccgcttagctttggccagacaaagacaagggtggcctggacaccctgttcctggcctgttcccacctagcttggctccgccctaaacctagcgcctcatcctgatcctgtcctctggctccccacagccccagtggctagactctggccccgctcccagttctaaccctgtaccccaccagctgtggccttgccctgtacttaccccactctgggccccaccccattccctggcccattctttcctggcttcttgccagacctgttcccccagtcccacctcctggtgttctcagtttctcccaccccacccataaggccccggggaagagcttgggggaccaactttgggttccttgaaggcttggggaggccctgcatcccagctacactacggccagcagatggccctatgacagagcacaggcctggtaacatcacctcccctatctggccctccgcttcctcctgtcaactgggcaacctcctcatgaggtcatagccagagttcacaaccatgtatctaacaggccaccctggggccaggcacacagtcagtaactgtgtgttccttagactgaaggggaaaaagccagttatgggatggatcccttggaagatgctgagccccacctgttttgagaagcatgcaagccaggatgacagaggccttgcagagagaacaggggtccagttagtcttcagatccccctggtccggagatttactcctgctctctcttcctcctcatttcggtctcccggaccctgcctgtctgttttccctgccccgacccctgcccaggtggtggcacacctcttctccagccatgccccacaggctgcccctcagcgcctgggcaagagcagctccgtcactcggctctacaaggcgcacactgtggccgccaagttccagcagtcactcctggatctggtggaaaagatggagaggtggggtggggggcaggtgggcggagcacccagcctcatccttaacccacctcatgaccctcagaggttgagcgccttctttttctgaggcctcatgctgtcctcttcctgccactgccaggtgcaaccccttgttcatgcgttgcctgaagcccaaccacaagaaggtgagtgagagctgaggcctctgagagagccaaatcctcctgcccatgctgtgtgaccttgggcaagtggcttggcctctcaggacctgcatctgcccagcctagcactgggaatattcaccatgataatgccttttgcacatggctgagccaatgtgcagactccctctctgggcatccctacaggagccaggtctctttgagccagatgtggtaatggcacaattacgctattcaggggtgctggagaccgtgaggatccgcaaggagggatttccagtgcgcctgcctttccaggggttcatcgacaggtatcttggttacggtagttcctgagctctacaaatccctgcccaactccccatggccccaggaatacacaacccaggcagtacagggcttgccatgcacagttgctcaggttgtacacttcacaaggctaccacatgctaactgttaatgtggtagatacatttattgttttgcctttttttgtagttatatgttgtataacgtataatatgtctaatcaacgctccgcgttattagaatggttttagtagttataatgacaagtttccagcaggtggcagtcaagtgtcctgttgtactgaaatcatctattataacaattgtctgacacccagaagtaaagagtcttgaggatggagtgccttttttcagattagaataaactatttgtggagccaccactgggaccaggctttttggacacctggctgggggcagtaaccccatggtctagcagacacctcgggtaggtctcatagccccagactaactttgggccccctaccaggtactgctgtctagtggccctcaagcatgacctgccggctaatggggacatgtgtgtgtcagtgctgagtcgcctgtgcaaagtcatgccaaacatgtaccgtgttggggtcagcaaggtgagtcctgcccgacagtcagcccttggagaccccaagtttgggggggtccacaactactgagtcagaaatgtccaagctagagactgccatcccaggagcaacccagatgagcttgggatatggaatgctaactacctgattcaccagcatcctctcttcaacctctccaagtccaccccatccctccagccccgctccaggaggctgccctgcctattctgtctccacggacttctagagagggaggggcccttagtccagcctcctggctcctatctgcctcagtgccttcctcctgtccttagctgttccttaaggaacacctataccagctgctggagagtatgcgagagcatgtcctgaatctggcagccctcactctgcagcgctgcctccgtggcttcttcattaagcggcgattccgctctctgcgccacaagatcatcctgctgcaaagccgggcccgtggctaccttgccaggtgaggcacagaaaaggcaggattcctaggagacctatggtcaggctcgggagaggtcacgcctgaacttaggtggtgagctccctatccctggaggcatgcaagctgagggtggaggcctctgcaggagaatgatcagattctctgtgtctctgcttttgaatgcccttcccagccaaccccaggcccttgtgactggtgggtgggaatccattcagccaagaggggccttaccctgcatttcagggacctgagattataagctgttgggaaataaattattcaggcaggtttaatccaggccttgctacttaatatgctgtgtgaccttggcaaagtcactgcccctctctgagctccagtttccctttgagccaaaggaccccaaaagtgagatgtgggcactggctcccaggccaggctggcaagggcctctctaccttttggtcaccctgtcaccctgtggccccaatccctgacctccccactaccccaacccaggcaacgctatcagcagatgaggaggagtctggtgaagttccggtccctggtacacgcatacgtgagccgccgacgctatctcaaggtataggccctaccctatctgggtccaaggggacagcagagaaggggaaagggcacttagcacccaagaggagactactggcctcaggcagtcttgggttcaaattctgcctctgccacccactagctctttaactttggccattgtctatcctcgattttcccatctaccccttgggattgtggagagggttaaatgagatgttgcattgaaggatttggcctggtgctgggttcacagtggggtcttcgggaattgagggccattagaatttggtgacctgaatgtcactgggtatggttttgctcttaccttcatgtcttgacccactgtcatgcaaactagccaccagaaagacaaatgcagttcccaaagcaatgaagcagtaggtagcctttactgaaggtggcgctacagaggagggcttcccatgacacagtgctcagccacctcccagaaatcctccttgtgtgtctctttccccagcgtttttctccctccgcttgcctctgtttctctcttgctctctccttttccctccccttttctctggccaacctcagcctcccgccccacctgtggagtggggcagtcacctccacacaacaggcaagctgccccccttgcttgagtgtggccgccttgcgtaagctggcctggcctgcctgggtgccggtcgtcacctctgcctgccactccccaacctgacatcttctcttctgaagctgagggcagagtggaggtgccaggtggagggggcgctgctgtgggagcaggaggtgggtgtgggtctgggtggcagcagggccaaggagggaggctggcaggtggggatgtggcaggcctgtccctgtcccatgcactgtccctctaggagctgagcaagcgggaggtagtcgctgtggggcacctggaggtaccggctgagctggctgggctcttgcaagcagtggcaggtgggtcagcaccaggcggggggagggcccaggcagatcagagcaggcaccgcattccctcctctttccacaggcctcgggctggcccaggtgcctcaggtggcccctgtgaggactcctcgactccaggctgagccccgtgtcacactgcccctggacatcaacaactatcctatggccaagtttgtccagtgccacttcaaggtaagggctagctgaagtccaaggctccctggctgataggcgctgaccaattagaatggacattgtccttgccctggggcaggctcctggctgtgccctgtggtgttgggtatgagccttttagttgctggatcatagggaatctgggagatccctgaggtctggatagcagtggagagccctcaggggctcgggcagggctgtttaccaccaaccagtctggaaatatttcagaaattgaacaactggtggagccatagcatgtcagcccagctctgatttcctccccttgagatgaaggtttatcctgtccctaccaccgacttgctgagggccactgtggtggcccctcaccagcctcagtttccccatccatacactgaggaccaaagcccctgcctcataggccttggagccccatgtggcacagagcagtgggtccagatgtgcctgtcagtccagctctgtctgctcatgtgcctgccctgtgtcttaggaacctgcctttgggatgctgacagtgcccctgaggacacccctcacgcagctgccagccgagcaccatgcagaagccgtgagcatcttcaagctggtatggggtctgccccagcccaccttctaattcttagcccctggccctgaaactgggccatgaggctcccagtcttcccagccctccccaagcccaacccatgagccccacacctcttccccaaaggacagacttttatgtcagagggggaaatctggcttcctctctgaggactggtggcttttcttctcccagccatcttcctggcaaaaaaaaaaaaaaaaaaattctgccttggagcctctcaaggacaccaagaagagacccagatctccttaaggacttctcagtctgaagggggaggcagagttgacccagccagtgaccaccagtatggacagagggaagcaccaagtctggggagtctgatggggccactaattcagccctgggcagggccagagagggcttcctggaggagaaggcatttgagctggaggggaatttgccaggcagggagagtggagaaagtacacagagaagaggaaattggtgtggtcagaacagagtcaagagggcaagggtgagactggccagtgaggccttgattacagtacccagagcttagatttcatcccaaggcacctagggagccaaggcaggtgcttccatgggagggttgtggtcatatctgaatgttaaaaagaaccctctgcggcctagatagagcaggaggtgggggctggctggagggccaggggtgcagggagggggctagggctgcatggggagctctagaaggttcatgaacaggaaagatgacacatactttggatctttagttttcccatagttgaggtaaactgcctggtcattcggcatagaatatggcagttgtaggccaagcacggtggcgcacacttgtaatcccagcactttgggaggccaaggcaggcagatcccttgagtccaggagtttgagaccagcctgggcaacatggtgaaacgctgtctctactaaaaatacaaaaattagctgggtgtggctgcatgtgcctgtaatcctagctacctgaggggctgaggtgggaggatcacttaggcccggggaagttgaggctgcagtgagctgagatcccaccactgcactccagtctgggtgacagagactccatctcaaaaaaatattctatatatatagcagttatattgtaatataagggacatttatatgggcaggggcacacatgggagggacatgagagggatgcatgttgtggggtggggactggaaggaacaactttctgagatgcccaggagactctgttcgtggcccagatcctgcgcttcatgggcgacccccacctgcatggtgcccgggagaacatcttcgggaactacatcgtgcagaaggggctggcggtgcctgagctgcgggatgagatcctggcacagctggccaatcaggtgtggcacaatcacaatgcccacaatgctgagcggggctggctgctgctggccgcctgcctcagtggctttgcaccttccccgtgcttcaacaagtaccttctcaagtgagtgggactggataggggctgggacacgagggacggtggcaccagcagtggagcccaaggcagggtcttaaaggtcaggccaggagtcagatctctatgctgggaagctcaggcatggaggctggccagggctgctctgcatttctactgggctcagagcaagaaaggagggcaggccttcactgcaggggctaggagttaggtcagactggatgagggacttccagaactcagagtgggacaagaccagcatgtggagaatttggaaaagagcattgacctctcacagcatgagagtttaatggggtggttaggagcatggatacgggactcagacaatcagggttcaaatcccagctcagccatatatgagctgtgtgaccttgggtaagttacttaacctctctgggctttagtttccttacatatcaaatgggggttattcttttatagtttataagtgtgatgattgagttttcatgctcaggcatgagatgtgtcaccctcaaaccttgctaaaacatcagcacaagaccagacgcagtggctcaggcctgtaatcccagcactttgggaggccaagatgggaggatcgcttgagcccaggagttgaagaccagcctggacaatgtattgagaccttgtctctgcaaaaaatttaaaaattagctaggcatagtggcacacgcatgtagtcccagctactcaagaggttgaggcaagagcattgcttgaacccaggaggttgaggatgcagtgagccaagatcatgccacttacacttcagcctgggcaacagagcaagaccctgtctgatgttaaaaaaaaatggcataatgataatacctacttcataggctcttgtgtggataaaatatataaacacacgtaaagtgcttagaacagagaggggcacatggtaggtgctatgtgggtataaccatcacaatgatgtcaccctgctgggtgagaaggatgatttgcaaggaaatcgctcaggcaggccctgggtgtgaatctcagctctgatacttacctgctgtgtggcctgagacaagtcactgtccctctctgaacctgtttcttccctataatttggggatggcaacagaacccacctaacagggtggctgtgagttagagtatacagaatcttgcttaggccagcatgcagcaaatggacatcacctggccagtcttgtgactctgtggcagctgacagcagggtaaggccgttgctggtctgcctgcctggggctttcctgagggcatggtgctaggttccctctctagctactgtgggcctgcaccagtgctgctcttggccaggcttagctgcaggagatgtaggatgtgggggtgagggaagcatgaggaatggctggtagggattgggctcattgggcctgggttgagttgaaccctcagctgtcccttttataggtgaaaacttggaggagaggctcagagagggcagataatcatccaaggttgccctgtgagagaatggagacagagttctggttgttgcccacacccagctgcagaccccagcctgtcaatgacattttgttccaacaagctggtacctctttggcctatccttggacctctgggctggcctgagatacttctggactagcctgggaccctttcagtttagccgtgggactctaaactaccctgagatcttttgtaggctagcctgggaccccttaagtgcagtcccagagcactggactctagcctgggacccttgtgaaccagcctggagcctttttagcctcaccttggagctctggagtagcctgggcctttctcagactagcctcagaatttcctacccccaccccgcagccctcagccccaagctagcttcagatccttcttgatcctggctccaactcctacccatcaggtttgtgtctgattatgggcggaatggcttccaggctgtgtgtcagcaccgcctcatgcaggccatgggccgggcccaacagcagggctcgggggctgcccgcaccttacccccgacccagctcgagtggacagcgacctatgagaaggccagcatggcgctggacgtgggctgcttcaatggtaagctgccttcccccacctcagtgagggcagtgggagtcagcagggcccagtgagccccggggatggcagaagccactggatgttctggagctggggaggggccttctcagatgtggctctgcgtgaaagtctgtgtgtgggggtgggacctggcccaggaaaggggagccagggaagtgaggctacagatacaggaagcctgaaaggaagaagcaagcagggaggcacagccaaactggactcagatgctccaacctgagcccggcacctgctgcgccccaggtgaccagttctcctgcccggtgcactcctggagtacgggggaagaggtggctggagacattctgaggcacaggttggctcctaggatgccctcccagcacactcttatgtacctggaatgttgtggggggaggtcagatcccccagagggtcccatagggtccattctgttcatgtttagggtctggcttataacccaggatctccccaggtagtgcctgatgactctgtccctcatttccattcctgtgcatgccatcaccagggggctggcagatggctggcgcggctggaccgtggccatgaagaatggtgtccagtgggcagagctggctggccacgactacgtgttagacctggtgtcggacctggagctgctcagggacttccctcgacagaagtcctacttcattgtgggcacagaggggcctgcagccagcaggggaggccccaaagtgtaggtagctatgggggaccccctcacagatggccactcccaggcagaaggccggccactcccaggcagaaggcctgcccctcccagctgctgggacaggctgagccctgaacttagacttcaggttcttaaggaggtagagttcaccaaaggatcctgcttttaaatggagaaagccactgaataccagggtgcagaagaaaatttgggggattctgggatctctctgggggtcagtagctccatgttccttttctccacagggtgtttgggaacagctgggactcggatgaggacatgtccactagaccccagccccaggagcacatgcccaaagtacttgactctgatgggtacagcagccacaatcaggacggtacaaatggggagactgaggcccaaagagggacagcaacccaccaaggtcaaccaacaatggctgctgtctctggtggggagggagccttagaggctgtgtggggtggaaatcatcaagaaaaaagaacttgacatttttgtgccttcccctccagagtcagacagtcttggagagcctgctgtgccccacaaggggctggactgctacctggatagcctctttgaccctgtgctgtcctacggggatgcggtagggatggtgtggggtgggtcatttgcagacagcaggcacagcatgtacacccaagtcacacacttgtacagggtgacctgagagcttctcacagccagggtcatggggtggtgtgtcccatctggatgtctgctggaggctggacaaaggatgagggtctcttcacagctagagatgctcttggctgatcctggaaggacccacagttagaagtgcacctctagcaaggtgtggtggcatgcctctgtagtcccaactacttaggaggctgagatgggaggatcacttgagcccaggagtctgaggctgcagtgagctgtgattgcaccactgtgctccagcctgggcaacaacaagaccctgtctcaaaaaaaaaaaaaaaaaaaaagaaagggaagaagtgcacctttggtggcagccagccccccggggccactaaaatatctctatctggatggagttgaatgaccttggtccccgggtcttctagccccagatctcacgagacccctcaggtacccttactcactctggaaactccagaacccaccccacccccactgcccctggcatgatatgcagccctgagcagggcacaacccctccttgagcctcagtttactcctctggggaagaggggatgggttgggagctcatatggttatggatacgactgattgggatgccataggggtaaaggctgagcatacagcagacactgagccagtgggaggctgccccctcccacgagagggtggggaagaggccagtgtcaggtgcctgttgccatggaaccttgggagtacaataatgagatggtcacttgagccacccactgcccccaggacctggagaagccaacagccattgcctaccgcatgaaagggggaggccagcccggtggaggcagcagtagtggtactgaagacacccccaggagacccccagagccaaagccaagtcagtgcctccccagggtggttccagggttgggcagggccagagccacttgctggtgtgctagaatggaggcagccacagcatgatgggggctgagaggacagggaggagggcatctccggtgccatctgtgccttctgccccctcccctcagtcccaggcctggatgcctccacattggctctgcagcaagccttcatccacaaacaggccgtgctgctggtgagtgagggagggactgctggggggtggagaatggacctgcctggtcaccactgccacctctccccaggcccgggagatgaccctgcaggccacggcactccagcagcagcccctgagtgctgccctgagatccttgcccgcagaggtgagcctggcctgcccagggtgcaggggttgcttggagacacaagctgtaaagaggaatgctgtgctgctccagggcactattgtgcctctttgagcccaggagctccacaacccatctctgacagagatctggagtcccagagagcagcctggtatatcccaggcagcccaccctcacgtcctgttctccacagaaacccccagcaccagaggcacagccgacgtctgtaggcaccggtccccctgccaaacccgtgctcctgcgtgccactccaaagcccttggccccagcccctctggccaaggctccaaggctccccatcaagcctgtggctgcccctgttctagctcaggatcaggcttctccagaaaccagtgagtgccctatcccagcctctggggcttcccaggacaggcctggtggtgtggttgtgccccttgtggcctcaccctgttcccaccgcgccccttgcccacagcttcaccctccccagagctggtccggtactctacgctcaactctgagcacttcccacagcccacacagcagatcaagaatattgtcaggcagtaccagcagccgttccggggaggccggcctgaggccctcaggtcagcactgcccctgcccccagcccgccagccccctcactgtacctgagtgtccatcatggcccaccagcttactgggttgaagcgccctgcccagctcctgttagggagggagtttctttatactgatgagtccagatgaggccctgctgttgtctaggttgtgctgtaggacttcaggccagtctctgcttctccctggattctcatttataatgatagggggtggtggaggaggaggaagtttcctactgtcaaactatgtgatgggaaagggagactcagtgtcaacccaccacagtactccaatgcccacaggaaggatggcgggaaagtgttcatgaagcggccagaccctcatgaggaggccctgatgatcctgaaagggcagatgacccacctggcagctgcacctggcacccaggtgaggggggaaggtggggctgagcccaggtggaacagaagacaaagaggggcctcagggatcctcagaaaccagctacccctataagctgtggccctgccactgcccctccacagggcctgcctgttgccccctgagcagtctctttggggtgggacaggtgtccagagaggccgtggccctggtgaagccggtgaccagtgcaccaaggccatccatggcacccacttcaggtgagagggccaggagggagggaggggagggtgtccaagtatatgaggaagtctgtgggcacaggtgagtgtgtcggtggagtgtgtgtgtctatgtccctgagcccctgtgtacatcttgtgagcacattggtgtaattataatgtcaatacttaagtagcacagatctcaggccaggcccatcctggcctcatgtaatcctaccagaacccttcaaggtagcactgttgttcctacatgttgcagatggggaaatggaggcacagataggttaactggcttgcctaaggtcacacagctcaaaagtgtcagaccagggatatcagctcaggcctcctggcatcacagttgaagccctaacctctacaccctttgtctctcagcagctgcagtgatcttaacagctataaagcagttcccatcctgcccctgataaaaaaccctctgatggctcctacaataagctccaaactcctcaccgtggcctatgagacgcgacatgatgtgcccacctccccagcctcatctcctctcttcctccccttggcacattctgttcctctctgttctcggaacactccaagcccactcctgccttgcatgttccctgtgcctagaatgctcttccccaagacctttgcatgcctggctccttctcaccattcatgtcacagctcaaatgtcacctctgtcacctcggcaaggtctgcctagattgctaggagtgaaggacctcacagaccagctctccaggatccatcctaaaccaccctgctttactgccaccccagcctcgggcagtgagagctttgtttctgaatgatctgtgccacccacacctgccatgggcactaaactccagggcaggggcattgtttaccttatttgcggggccatctcagcctttagcccaggcctgtatacaataggtgttttggctgggtgtagtggctcacgcctgtaatcccagcactttgggagtccgaggcgggcggatcacaaggtcaagagatcaagaccatcctggccaatatggtgaaaccccttctctgctaaaaacacaaaaattagctgggcgtggtggtgggcacatccaataggtgtttttatgtgttgaatgaaaggctgggtcatatgtgacccttgtgagcagctgtttccgtggactgctcctgggtcccctcctccacccgccctgcctctcccatttcatcctaggaggtgcctgtggccgggcgcagtagctcatgcctgtaatcccagcactttgggaggccgaggcgggcggaccacctgaggtcaggaatttgagactagccggcccaacatggcgaaaccccatctctactaaacatacaaaaaattagccaggcgtcgtggcgggcgcctgtaatcccagctactcaggaggctgaggcaggagaatcgcttgaacccaggaggcggagcttgcagtgggccgagattgcgccactgcactctagcctgggggacaacagcgaaactccgtctcaaaaatatatatatatattaattaaataaaaaaacgaggtgccttctcctgactccctgatccccgcgctctccagctctgccctcgcgatcgctggagccccctgaggaactcacgcagacgcggctgcaccgcctcatcaatcccaacttctacggctatcaggacgccccctggaagatcttcctgcgcaaagaggtgccgagcacagccgtagccaggggaggggctgaagcggggcaggggaggggctgaagcgagcagaggagggtctaggacttggggagggagcccaggaggacagaaaaaggccgggctgaaaccaggggtggggttacagccggggcggaactgcatttagggggcggggccgggtgtgaagcaaggccagggggcagtcggacagtacccactgaagccccgcccctgcaggtgttttaccccaaggacagctacagccatcctgtgcagcttgacctcctgttccggcaggtgaggtcctgtctcccctttctgcctcagtgaactcagcagggctgtgtggacgcaaagatgagctagctgcaaagcctgcctctgcatgttgggatttggggtccttgacaggggtgaggatgggcagctgttttattgaatctccccctcccatgggcagggtcagtgagcccacagttcaacccaatcagagccatagtctgtctgagctagacatggcccagagatcaaatgtaaaccctgtaaacccccctatatagagtaggaaacggtggcctaggaagggtggcctggattgtggggctgaggagaaaggagagggccctgtaagtgggatctgatttacacagatgacccagcttacagatgaccccactgctgcaaaatgggacccctcccacattgccactcaccctagtatagtccagcctgggtcccagctgggggagtcccatgtgctgcctgcatcacagcctgttcccacagatcctgcacgacacgctctccgaggcctgccttcgcatctctgaggatgagaggctcaggatgaaggccttgtttggtatctcgggggagaggaggggtactgatggggcaaccagtcagaggcacagccagccctgtcccagagggagactgaggctgacaagcccaggcccaccatctcccagacatgtgcctccttgctctgcttctctggcctctcgcatggccgggctgcatgtttggggttggcaatgcctgacacactgtgtgtcctggccatctcatccatttctgggtttcagttttctagtatagacactggtcagataccttcttgctgggtatcagccacctccctccctgacatccccgagatgggggttgccaggggagtggggagagggtcctgaccagacctggcctcccatagcccagaaccagctggacacacagaagcctctggtaacggaaagcgtgaagcgggccgtggtcagcactgcacgagacacctgggaggtctacttctcccgcatcttccccgccacggtgcgagcccctcacttgccccctacctgtccagaggattcagggatgagacaagaggatcctcacacgcccttcatctctgccccagggcagcgtgggcactggtgtgcagctcctagctgtgtcccacgtgggcatcaaactcctgaggatggtcaagggtggccaggaggccggcgggcagctgcgggtcctgcgtgcatacaggtgaccagcaggggtgaagtggggctggctggagactgggatacagactggcatcggcatttccttcccctccacagccacttaccaagtacccatgatgcgccaggctctgtgccaagccattgaagcaaacccattttagagctggggaaactgaggctcagagagagaagttgtttgtctcaggtcacacagccaggaagggattgagctaggcacccactcccctgccctccccccaacctgcacagcagcagcactgtgcagaggggcagctgtgctggaaatgaccaaatcctgatgcagctggggagggaaccactgccagcagtgacaccttactgagtactcagactccctcccctgctagaagtcccttttgtcctttttaacacgaggatgggaatggaaccttgctaactggttaggtaaaacctgcatgctttgaaagatggagagaatttggtcaatgggtgaaagagagatttgggtaggtgcaaatctagatttagagcttggaccaagggacaaagggtggagaggggccggagtgtcagcccaaagggtggtaggaactgagctgaagccacagcctgggtcagagaggggaagcaggaagcttagggttctgtgggagctggcacaatggggccaaggtggggctgggcttcaaatggggcaggacaggatcagaagcagcacaataggtggaaggagggcatccctctggcaggggagtcatgccaccggcccatcctccagctttgcagatatcctgtttgtgaccatgccctcccagaacatgctggagttcaacctggccagtgagaaggtcatcctcttctcagcccgagcgcaccaggtcaagaccctggtagatgacttcatcttggagctgaagaaggtcaggatcttctcacagatcttccctccacccaggctgagggccagcaacagggatctccctgttccagggaaatatgactgtgtccatagatttctgtctaccttaaggcctttgcactggctgtgccttccacttggaataccctttctcccttttgcctgctccttcagaaaacctttgccagtgccccctgccgggtggcacagcacctcctctgaggtctgcagcaattgtactccttaccctcctgccttggctgcatggcccgcccactgcatcacaatctctttccatcccctctgcccactcctgactggcagcccccaggcctagggcaggtcatctctgtgccccaggcccgaggaagacttcagcaggaaagtctgtgagggattgagtggggaaggcctatgtgtgtgccctaaagtccatctgtgtccctcagactcaccctccagccctttcttccacccagaatgcccttccctcttctcacctaatgaaggctcccttccctgatgagtcaggaaggatgtgaggagcaggggtggccctaggcctctgggagtggggtgatagggctgttgccctcaccctgcctctggctgacccaggactctgactacgtggtcgctgtgaggaacttcctgcctgaggaccctgcgctgctggctttccacaagggtgacatcatacacctgcagcccctagagccacctcgagtgggtcagtgccactggggtgggctgggggcaggagggggaggctggccaagggggcctccctggcagatgctgacccgagcctggcccataggctacagtgctggctgcgtggttcgcaggaaggtggtgtacctggaggagctgcgacgtagaggccccgactttggtgtgtgccccagaacctggaaccccatacggggcgcatcctagtttcacccactcgtggtgcagatgcacagtgagggtttcttggtgcccgaaagtggcctgggctggtcaggtctcctaaggtccagccgtggcctgtcagtatctgttggtggccagacagcccagccctctgctttgcctgaggggtctccgtgggcatttccatgtttgtggcctgaatctctctttatgtctccacatgacctgagagtccacaaaccctgctttgcctttttgcttcacttcccctttatggtcctgtggccctgagaaaatccctttctttccctgagcctgtttcctcatctgtaaaatgggtttgatggcctggcctgcctcatagagttccagagaagggttaagaatgttcccaaatctccctaaaggacccccttagtcacaagacaagaccctcctgtttgcctcagaccttttacccacccctaggctggaggttcgggaccatccacgggcgcgtgggccgcttcccttcggagctggtgcagcccgctgctgcccccgacttcctgcagctgccaacggagccaggccgcggccgagcagccgccgtggccgctgctgtggcctctgcagccgctgcacaggaggtgggccgcaggagagaggtgagaccagtgtgggtggggtggggcggggtagaccagggggaaggggccgctgcagaaggggtgaggcgagtggggataaggtgggccaagggcctggccaggctcttggggcgtggctgatcttggactagtgtgagggtgaaccaggtagagtgagccgcaggtgagacccgggagatgggaccagagatggttggaggtgtggccaaatggggtagggaaggatgaagatcagctggttgtaatcaggacaatggggtcagaccagccggggcccgccagttggtgaagtctactgggtttggggcggtgccaggtgagtgggcggcttgtggagctagcgaggggcggggtcagctgtgacgtggcagttgcggaagtcaaccccgggcaagggcgtggccaagtggggcagggagccaggttagcacagcaagtaaaaggcgtgggcgggctgaaggggtaagaacaacgggatgcgggtgggtccacagggatgggtgggtgggcggcttgagaatctgggtccagtcagctaggggttgcgttgtcagttttgaccgaagggctaggcgtggtgtggccggactgggccttcctagctccgcctcttctgcagggtcccccagtcagggcccgctctgctgaccatggggaggacgccctggcgctcccaccctacacaatgctcgagtttgcccagaagtatttccgagaccctcagaggagaccccagtgagtggcggccccacccctcttcccacagtgggagggtgctgggcttcttgctgccatccaaactgcaggctgtcagtctcggaggccccacttctggtgggagagatgagagaccacccaggtgtgaggctcatttcagtgcctgcctctgggggtcttcgtgaccggtagactgatcagtggtgggtcaagaaccccctccctgggggttctttcccatgtggaaaaggatgtagccaaggcttgggcaggacaggtcagtagcacccacctcccactgcagggatggcctcaggctgaaatccaaggagcctcgggagtccagaaccttggaggacatgctttgcttcaccaaggtgtccagtcccggacctcagtttccccatctgtaaaatggtgatgcaggggccccctcccaggcccctggggccaacaaacttgttctcagtgagaccctctgattctcagcaccctgattccctcccaaggacagcctctgtccccagtgttgggcctggctccccttttgtgacgtggaccctcctgttatcatatggccttggaacacaatgtgtcccctttctgttctgacgtgtccctcctccatcatgacacagccctcttcccccacagactcccctccaggaatccctcatcgaactcagcgacagcagcctcagcaagatggccaccgacatgttcctaggtgtgggagtgggactgcagccagggctctgggctaggtgggatccagcactgtgtgatctctactggttgccactcctccctgatcttcagattctttccctcccgccagctcagacatggaacacatttaagagaatagaagctcccagctgcctgtggccaaggctcccagggaggggctcagccctggggcttcctggggtgggtgggcaactgggggtttggtgggtctgagtgggataggtctttcctacagctgtaatgaggttcatgggggatgccccactgaagggccagagtgacctggacgtgctttgtaacctcctgaaggtcagtccagccaactttgccagatgccccctttcctgctctgtggttcagtttccccatctatcaatgagtcacaggacattagggtgggaaacctctcccatggtccaaagaggaatgcatcatgctggtggggagggggctgggaaagggacaccaggcctgtcttcaggtgcccaccctgttcttatgtacctggtatatgacatagcccctcacatgtctttggtgtgtaacctccctgccccccttcagctgtgcggggaccatgaggtcatgcgggatgaatgttactgccaagttgtgaagcagatcacagacaataccagctccaagcagtgagtgaactggactttaccccaccatcccctcactgtgtccatgctccaggagggaccagttcagcctcccacctcctcaggcctgacccctcctggattatcttcctctcaccctcatcctcactcaatagagcacgttttttggaattacttggtctggaacacaccatttctgctctctgaactttagtgccctcatctgtaaaatgacagtgataatgtgtaagtccagattcttagttgcaagtgacagaaacccaactcaatctggtttagccaaaagggaacttgttgattcagagaagtgaaaagtcagtgagtatgtggcctcaggcatagctggatccaggtgtcatcaggaagcaggctttctccatcttctggctctgctttcctctgtgttgatcattcccaaacagcctctcgcacagagtagcaaggtggcaggtctggggcaacagctcagcaatcccagagaaagcaagactgacccaatatttgctgtagaaattcttaaatccagccttacaggcctgagttggtcacatgctcaaccctgaaccaactatgcctatccctgggccaatcactgtggccaggggctgcggtgttcacattgaccaaacctgacttccatgcccatctccaaaccacagggatccagagcggggtgggtggtttcccaaaggaagcccaagtgttgttcccagacaccagatatccctacaaatgaaaccctcacacccaggaccatgtgaagatgaattactgtgttccactcatgcagggccagcacacagtacgtgcccaatgtgtgcatgctcttgttaccatcaggtccaccctcctgtctccatctgtactacctcctcacttgctctccatctcctcaggatttttagaaccactcagcttgtcctcctgctcctcccagccctgggccttacctggcatgacctctacacagtctcagcagcttccccttttcccagaagcctccctagagagatcccctacctgttgtgaggcagagaagagaagaataggagaggaaagagtcgcagtgcttcccctacctggggaagatgtctggggccccatccccttctgtccctatccccaatcctgacttcccaagcagaatatgccttttgcatatcactgcgcagggaggggcatcctcaggggacaggagctgcctgagagttggaatctgtctcagctcaatcccaggaggctcttggcacactctagtgctgtggccacctctgctgtagcccccatgtgtccttgcagggacagctgccagcgaggctggaggctgctgtatatcgtgaccgcctaccacagctgctctgaggtcctccacccacacctcactcgcttcctccaagacgtgagccggaccccaggcctgccctttcagggtgagaggtcaatgagtgggaacccagggctgcatgcttctcccttggggactgggtggacagctggtgggaggggaaacccagagggcctcgctcttcacaggtgctgagcaatgtttaccaatattaatatactccccaaacatttgttaaggtttcacaggggctggcgtggtggtttgtctgatctaatggagggggtggtcagggatgactccttggaggaagtattgccctgggtaggagggatttccaggtggagtgagtgacaggagcaaagacaggagtgggaatatgtggtacgtgggagaagagaaggaggtgggcaagaatccagagtactggggtgcggccctgcctctctgactgttgggactcagcaagggtcttgagggatctgggcagaggtgggcccaagctggtatcatcccccttagaatatggagaaagggggggccactcttcagcgttgtttccatagcaacccctggggctccctaagaaggaggctggggcccctgtagtcaccatggcagccgtggaggagataggagaccttacccttcctgcctctgaatgcttctctctgattcaattaacaaacattcaacccacagatgaatagacccagctccctatggaagagctcccagatgcataaaagcagcagaatgtgccctagaactcttgactcaagagaaatggagcactgatgctggggtctcctgcactgggaggcctgggtgagggagggcagctggcagggtatcccagctggcatgagcagagctgcatcaccctagccacagagcctgtgagatacaagctccccagtcagcagctcagggtgacagcggtttccaggcgtataggttgccaaggggactatgggctagataaaaggtccttagccacatgggatgtgggttcaaatccagctcttaacctctagctcttgaccttgggcaagtcactgtccctgtctgaactgtttcctcaactgtcaaatgggggagtaaatgccttccccacagcttgtggagagaatgcagtgggctcatggttggtggcaagaggagcgagcccctttctcccacagtccaccttgggcgaggcctgaactccctgcttctgcagggatcgccaaggcctgcgagcagaacctgcagaaaaccttgcgcttcggaggtcgtctggagctccccagcagcatagagcttcgggccatgttggtgagcatagggtgggagtgggttcaaaatgaatgggaggctgggcgcagtggctcatgcctgtaatcccagcactttgggaggctgaggcgggcagatcacctgaggtcaggagttcgagaccagcctggccaacatggtgaaaccccgtctctactaaaaatacaaaaattagccgggcatggtggcaggcacctgtaatcccagctactcgggaggctaaggcaggagaattacttgaacccaggaggcagaggttgcagtgagccaagatcgtgccactgcattccagcctgggtgacagagcgagactccatgtcaaaaaacaaaaacaaacacacacaaaaaaatgaatgggagacacaagccctgcccagagacctctctgtcaggtgcattgcactcaggggcttgcagacaggccctgcgcggtccaggtgctcaagtgttcctacacgtgccagcccaggatcctttggcttgggaactcccagggcaggagacaagggctgtcccagatcctaggacccaacctgtcatccctctcccacctatctaccccaggcaggccgcagttccaagaggcaactctttcttcttcctggaggccttgaacgccatctcaaaatcaaaacatgcactgtaagtgaagaaatgtctcctgcagccaggtactggaggggcagggacaaggacagcccaggctccaggatgggggtggagtaagcccccaatgatgctgagccctcccaggctctcccacagccccacaaggcaggacttatttctcagaagagcaaactgcacctcagagaggttaagcctctggctcagggtcatcctgcaaaaaagggacagaagcagattttaaacctaagtctcagaccacaagctgtgttctttccctgcctgaggctgattctcagagacctcagaggattgtgcgcctttgtgaagagggctgaggaactccacacatggcctctgggggcctgagtggggccagaaggacagaggtcaagcccaactggcatggcctcatctcttccgccccacccccaggtggccctggacgtggtggaagagatatgtgctgagatggctctgacacgccctgaggccttcaatgaatatgttatcttcgttgtcaccaaccgtggtgagtgccaggaagactgagcatgctgggcccattcccatccccgggccttgtgccatgtggggccctccacccagattttagggcccaagtcaggtgccacttcctccaggaagccccttgacccccatgtggaaggatctctgtgtgtaccaagcacgcccagccctttatctgtccctttctgctttgcttagtttgcctcaccttatgatgagagccctctctcatccctccctttgtccctcaggacatgctcaatgtgaggacacaggccgtgccctcaaggagattacatcctggaaaggtttccattaatagcgccgcatattatggaacctataggaacctataggtgcaagccttctttcctgcctttcatgccttaataatggccagagaagcccctcccgaggtgtcactagcccctctcgagggctcctgggaccctaggtgaccgtcatgcatcccaaagccccttccatctgctgactgcccactctagatcatggtcttccctcctgtcaccagctggtcagctccagcaacccccagccagctctccctactgctgcctcagtcctcagccatgtgccatcagccctgcctgcccaagtccagctaagacattaggggagaatggcaggtaacaaaacggtcctaataactgatatttattgaacggatgctgtgccccaggtataattcaaagcatttcaggctgggtgtggtggctcatgcctgtaatcccagcactttgggaggccgaggcgggtggatctcttgaggccaggagtttcagggcagcctggccaacatggcgaagccccatctctactaaaaattagccaaccatggtagtgtgcacctgtaattccagctactcaggaggctgaggcacaacaatcacttgaacctgggaggcggaggttgtagtgagccatgatcatgccactgtactccagcctgggtgatggagtgagactctatctgcaaaaaaaaaaaaaaaaaaaaaaaaaagccaggtgtggtggcttgcacctttaatcccagcactctgagaggccgaggcgggtggatcacctaaggtcgggagttcgagaccagcctgagcaacatggagaaaccacatctccactaaaaatacaaaattagccaggcatggtgacgtttgcctgccactcaggagggtgaggcaggaggttgcagtgagctgagatcgtgcctgggcaacaagagcgaaactccatctcaaaaaaaaaaaaaaaaaaagcatttcattctgtgaactcttttaatccccacgacaaccttatgaagtggatggagactgttagcttttccatttacagatgggaaaactgaggcccagggaggctgtattagttttctattgttgctataacagattatcacaaatttagtggcttaaaaaaacataaatatattaccttataattctgaaagtcagaagttctaaaatgaaaatggcatcagggccaggttccttctggaagctctagggaataatttgtttcctttccttttccggcttctagaggctgcccgcattccttggcccatggccctttcctccatctccaaagccagcagtgtagaatcctcatatctctctccctgccagcctctgcttctggtctcacatctcctcctctgattctgacccttctgctttcctcttatgaggacccatgtgctgatgacactgggcctgcttggataatccaggatcatctccatctccacatccttaacttaatcacatgtgcagagtgccttttgccaggaaagtgacatattcataagttctagggattaggacctggacatctttggaggggtcattattcagcctgccacagaagctgtgacttacagtcacacagtggtaatcatgtaatcataccaaactccctctctttagtaagattttactgcaggtgtgagatgggtggcaaaaatgtcagtgcaagagagaaagacttgagcttctcccaggctcagaccccagtcctccccacccccacctatgccaggtacctggcaaggggtctctcctgaaggaggtctgcagaaaggcacccactgggtctcatagtgtgaggcctcttgtgtttgtccttgttcccagcctcctctggaaaggagctgggccttctctgagaataatgcagggcactttcccagatccaggcaggccacactcggggcactcctcaggagcccctctttccccaggagaaatggagcattacttaaagctttgaattggagttattaccatctgtggtcatcaatatttcagtaaaacataggacaccccattcgacaagcatgctctcctttaatgaggaagctgtgtcccagaacaggcaggtggcttgtccgaggtgatacctcacctgggtagcagattggggtctgcacacatgctctgtacaggtgcacacatgtgtgtgcacacatgcccccacccagccctgcctccctgctctctgcaggccagcatgtgtgcccactcagtcgccgtgcttacatcctggatgtggcctcagagatggagcaggtggacggcggctacatgctctggttccggcgtgtgctctgggatcagccactcaagttcgagaatgagctatatgtgaccatgcactacaaccaggtcagcacacgtaggcttctctggactctgggaccttctaggctcccctgggcctgtgaatcagactccacagccttggtgtttgaagtgttcatgattcaggccctgtggatgtctctagccctgatgtctctgctcccctatgtggtctctttggagaaatcgaaacagccctcaccacctttgagagcctttgcgcatgccatccctccatctgtgcttcctgacttatttaagtccttcccagcaagctgcccccaaacagcacctcttccattaggccttctttgcattcccctttccttcggatgtcttcctcctctgaacatgggcctgtcctttgctccaagtgctaagccaggctttgctagtactgtcatttttgtctgtgtgttattctgtgagacttagaagtcctctaagtcaggatcatggagtttacaaagtctaggtttctcctactgtgccagtatgtgtggaagtgcttggacagaaagtgtgtgtttttgtggaactggtgccaaaacttcaggaattgtacacaatatggtcacgtagattttgtggccacgtggtgtcactgttgaagcatggccctgtgcagtccagcaccatgctactcaacctgaggcttgtggactggcaaaaacgggaggcaaatcctcaagtcccgcctcagacctcctgcctcagaccctcaggagcccagcctggctgtctgttttggcaagccctcccgtggctcaggcacactcagttttgagaaacagcaggcctgatagatacatgtccacactgcagtgttgatgctctgctctcaccagccagcccacatcctacacaaggttgctgtggggactccctcatgggcatcaaggccacagccctcccacgtcacccttatgtgcttctgccatcattccccgaaacccaggaaagtaataggccatcctaccccagaagaggatggggctgcaatcattaaacatgcatgtccccaggtcccctgcagccaagtgcctgcacgcgtgcctgcctggcagcccctcacccaggtgctccctgcaggtcctgcctgactacctgaagggactcttcagcagtgtgccggccagccggcccagcgagcagctgctgcagcaggtgtccaagctggcttcactgcagcatcgcgccaaggaccacttctacctgccgagcgtgtgagcatctgccctcctgcctcagctggggtggacaggcaaccctgccctctcagcccacctccaccctcctcagagctggcagtccccaggccctcaggctcccctcttataccagtggggctatctgggaaggggctgtccttgcctgggggctgaagtcttccaactagccacaggagctgggaccccgcctctctttcgcaagttgcttctggctggtattattagctcagagcaaaggtaatgataaaaaaagctttcaggacacatgttccctgtggtccaggaaatacatgtagctatgcagaaagattcagccacaaaagcattcactgcaatgctgctacaagagcaaaagatcagaagtaacctcaatatccagcaacagggagtcgtcaagtaaattatgggtgttagcctttatttacttatgtatttaattaattattgattttctctttctttttttaaaaatgatataccactttttatagagacggggtcttgctatgttgaccaggctgaatttttttatttttgtagaaacagggtcttgtggccgggcgcggtcgctcatgcctgtaatcccagcactttgagaggccaaggcgagcggatcatgaggtcaggagatcgagaccatcctggctaacatggtgaaactccgtctcactaaaactacaaaaaattagccaggcatggtggcaggcacctgtagttccagctactcgggaggctgaggcaggagaatgacgtgaacccgggaggcggagcttgcagtcagtgagccgagatagcgccattgcactccaaccggggtgacagagcaagactccgtctcaaaaaaaaaaaaagaaagaaaagaaacagggtcttgctactttgcccaggctgatcttgaacacctgggctcaagtaaccctcctgcctcagcctcccaaagcagtgggattacaggcatgagccaccctggctggcctagacagcctttaaactgacgttctctaagttataattaatgctcacaatgtaaatcagtcattctcaaatttttggtctcaagacctttttacactcttgaaaagaggaccttggccgggcaccgtggctcacacttgtaatcccagtactttgggaggccgagatgggcggatcaccagaggtcaggagtttgagaccagcctggccaacatggtgaaaccccgtatctactaaaaaaatttaaaaaaaaaaaaaattagccagaggtagtggcgggtgcctgtaatcccagctactcaggaggctgaagcaggagaatcacttgaaccctggaggtggaggttgcagtgagccgagattgtgccactgttctccagcctgggtgacaagagcgaaactccatctcaaaataataataataataataataataataataataataataataaaaataggctgggcacagtggctcacgcctgtaatcccagcactttgggaggtcgaggtgcgtggatcacctgaggtcaggggtttgaaaccatcctggccaacatggcgaaaccccatctctaataaaaacacaaaattagccgggcatggtggcgcatgcctgtaatcccagccacttgggagggtgaggcaggagaatcacttgaaactggcaggtggagggaggttgcagtgagccaaaatcatgccattgcactccagcctgggcaagaagagcaaaactccgtctcaaaataataataataataataataataacaggacctcgtggccgggcatggtggtgcacgcctgtaacgccagctactcgggaggctgaggcagaagaattgcttgaacgcaagaggcagaggttgcagtgagctgagattgtaccactacactccagcctgggcaatagagtaagactccgtctcaaaaacaaaaaaagtggacctcaaagagcttttgtttatgtgggttatatcaatgaatatatttaccctgttaaaatattgatttattaattcagttaaaaataaaaattaacccactaaatgtcaatataaataactttttatgaaaaataactctattttcaaaaaaaaatttagtgattcatgggcgtggtggcacatgcctgtagtcccagtaactggagaagctgaggtgggaggatcacttgagcctgggagttcgagttcgaggctgcagtgagccgtgattgcaccactggactccagcctaggtaacagagcaagaccctgtctcaaaaaaaaaaaaaaaaaaaaaaaaaaaccattagtgagaattttacatgttcaaagctctgtacttttacattttcaaagctctgtactgtctgacttaaggcagctgccttcccagatctgcttctgcagtcagcctgttaccatctcacatgttatacagcctctggaagactccactgtacacttgtgagagcacaagagagaaaatgacaagttcctaatgtgatgaaaatgattttcaaccccctcgaccacactttgagaacccctggaaaaacgaatagtaagatgatgtccgtaccatgtgtattccagcgcctgtaacacagtaagggctcaatatgtaaagctccttatttttattttattttattttattttattttattttatttatttattttgagacagagtctctctctgtcacccagactggagtgcagtgaccccatcacggctcactgcagccttgacctcttgggctcaagtgatcctcccacctcagcctcccaagtagctggaatcacaagtgcatgccaaaatgcccagctaatttttaaatttttgtagagacgggggtcttaccatgttgaccagactggtctcgaactcttgggctcaaagttaccctccctccttagcctcccaaagtgttgagattacaggtgtaatctcaacgctagccaccgcgccttgcctaaagctctttttttaatgtataattttaagtgaaaagagcaggaagcacataaagatataatcccaatcctggatgaaaataatcactgagttcttactttttgcaagggactctgcatctgcattatctcagctattcttcccaactccattttattttccccatttacagataaggcccagagaggttatatggcttactgaagactagccagctaatggtgggggaactagaatccaaaactggggaggctgggttcagatgccaggcccttaccccagcagtggaaagaaggacagatgttacccaggggatctcttgggaggagggggttcccctggttttctccccacccttccttcatctgcagctccagctggtcaggatgggctggtactgctattggtattttccagatgtccaaagaggtaaaggggctgcctgaggtagcagccagcgtatgtcagagggaagagggctggggcaagctgatgcccaggggcctcagcctggaggcccagcactcctctgctcaaggttctgcacagccctgtggctgctttgcctaccctgatgtttcctctcacccctccggcttttgcttctccttgggggcagaaggtatgaaggatgaaattgccttgggttcacatcttgcccccaccaacccatgccgctaactcactcagtcactgtgtgaccttgaactagtcagtgaacttctcagagcctcagttcccttaactgcaaacagggatcctagcagtactggccccggccatgattaagcagtaccaaggcactgtgggcacctctaccccactttcagcccatttacactccctagcatttagtcttccagggaggtgcatagatcaggactgctctgcatgcctgctgcacagtgaggattgcctgagcctgggagctcactcaggacctttttccccttcctccgtacacaggcgggaagtccaggagtacatcccagcccagctctaccgtacaacggcaggctcgacctggctcaacctggtcagccagcaccggcagcagacacaggcgctcagcccccaccaggcccgtgcccagtttctgggtaagagctgcagggcaggggaggtgatcatagggggctttgctgaggagggtggtcatggaggatgggtatggaggcacctctttctttgcacaaaggcatttttcagtgccagtcaagctgagcacctgcctggagaaaacatgtctttacattatggagatgtcacctaggctcaaagtggccctgggcagaggaagaagagctgcaagcagggatagaggaagaggccatgagaagggaggccagagagatgggaggagacccagaccaagggcttctgcactggctggacacagcccagagaagctatgcagttcagggccatggctgttgtcagtgagccctgcccagcacgtaactgccaccccctctccctgcccaggcctcctcagcgccttacctatgttcggctcctccttcttcttcatccagagctgcagcaacattgctgtgccagccccttgcatccttgccatcaaccacaatggcctcaactttctcagcacagagactcatgtgagtggcctcagcctggcactgccatcgccaccctctgttccctggtccccaaccccctccaagaggccaagacctccagccgccgaagcccagttccactgcttaccaccttcatgatctcaggcaagtctcttccctcctctgagccttgctttcctcatctggaaaatgaggataagagttgagccccacccatagggctgttgtgaaggtgagatgaggtaaaacatactctatgcactcaaatagtacatctgtgtgcttaggctgccataataaaagaccacagactgagtaacttaaacaacagaagtttatttctcacaattctggaggctggcggtccaaggtcaaggtgtcagcaggtttggtttctttggtggtttgcagacagctgtcctcactgtgtcctcacatggcctttcctctgtgtgcgcacaaccctggtatctctgtgtatccaaatttcctcttataaggacatctgtcatattggagtagggcccatcctaacagcttcattttaacttagtaacctctttaaaggccttatttctaaatacattctgaggcactgggagttaggatttcaacatgggaatttggtgggggacataattcagcccataataagtaggacctgttacccccttagtttttgctcccagaactagaccctgcgacagggattccagggcaagtggttgatttagagttgattccaggaaacactggagtgaggaagtgagacagggaagggatggagccagtagagggggtgttagcaagcaagttgctgatgtgggcacctggaggtcagtccagctggggagccctgagagacagactagagctttccttctctcctgggggtgagggagctggggtgtccattcaacacttcccatctgtcattagcaagagcttctttctgaggcattaactctctatcactctgactttccctgtatgtggtccaagtttgcttcctgggccagaaaacaagcccctagacaggctaggtacttgactcacatctgcagtcctagcacttagggaagcagaggcaggaggattccttgagcccaggagttttaagactggcctgggcaacacaggaggccccattttccacaaaaaggaaatttaaaaaagaggtggaggtgttcacaagaagcaactttgatgtgaagttcagggcaccaatacctctctatcccaagcacttagagcacttagaacagtgcctggtacatgatagatgcatcatctcatcagtatttgttgaatcaattttataggtgaggaaactgaggtccagagaggtaaagtgatttgctcaaggtcacgcaagtcactggggaactggtacttgaactggagtgagtctcctgcctcctacagatctgatttgcagggcaggggtaagagtggttgagactatcctcgcccacaggcctgtccggcccctctcctcctactcccaggaattgatggtgaagttccccctgaaggagatccagtcgacgcggacccagcggcccacggccaactccagctacccctatgtggagattgcgctgggggacgtggcggcccagcgcaccttgcagctgcagctggagcaggtgggcccagcgctaagtccaacattccactcactgggcccttctctgggcctggctccaagataggtcaggtccctgccatgccccagggagtatccaggccagtgcatgggacagaaccaaccacagcacagcacggaactgcagatcattatgggtggccatccagggaagcaacttggcagtgggaacacaggaaagggcagtacggagccatagaaggttgatgagagggcaaggacactagaggtttgagaaagttcacctgggctgagatgtggaggctggattgtaggccccaggattgagggtggagaaactgggcttcctgtgtgacagatggtgaaactgagacccacctgccctgtgccttcctatgtttgtagcaactgtggctgttacttaaaaggcaggggtgaaacaggcaccgtggctcatgcctgtaatcccagcactttggaaggctgaggcaaggcaagaggatcacttgagcccagaagtttgagaccaggcaacatagtgagacctagtctctgcaaaaataaaaaaaaaagtgcctgtagtcctagctattcaggaggctgaggcgggaggattgcttgagcccaggtgttggagttcgaggctgcagtgagctgtgatggtgccaatgcactccagcctgggtgacaaagtgagaccccatctctaaaataaaatgtaaaaaagcatggatgacctctagactcctgtccaagtctcacacccccctggggtcagggcaggactagcgttttcaccccactgaagagataggattcaggcccagagaagatgcagaattgaggttgacacccacacgtctgccctgtccagcctgtaacatcccccctccaggtctgggcccagcaccactcccatgacagggcctgtcttggagggggtgatttcccagggcaagagagagagacttccactgtcctagctctgcctctgagggacaggaccagacaaagtctccttggccccctgtgccccttggagagcctgttacttgggtctagggtcctaatgcactcctcaccacaccccaatctgctcctgcctggagtctgctgcctccttcccagaggccacctccctgagcccctgcaatggctctgtggtgttctcctacctctttttttttttttttttcagtagagacagggtcttgctatgttgcccagactagtcttaaactcctggcctcaaatgatcttcccacctcagtttcccaaagtgctgggattataagcgtgagccactgcacccagccttctccagccttcttgtgtgagcctggtcattccttctttggttcttttctggtctttcctcctctagactatcttttttttttttttttgaggcaaagtcttgctctgttgcccagtctggagtgcagtggtgtgatctcagctcactgcaacctccacctcctgggttcaagcgataatcccacctcagcctcccaagtagctgggactgcaggcgcatgccacaatgcctggctaatttttgtatttttagcagagatagggtttcaccattttggccaggttgttcttgaactcctgacctcaagtgatccatccacctcagcttcccaaagtgtagggaggggcgtacatgtgtaagccaccactcctggccccctagacaatctctaaacgttgctgagtctgggtctctccccagggcaccctgtctgatactgaggctttcaaaaccatgtctaccatcacagcatccatacttctacctcctgcccagactacctgagctccaggctccctcagcatcccccttggagaccaacagtcctctccagctttcctcccgatcctcccaggcactcaggccccaaatctgggagtccttcccatccctgtcccttcctcccatgacctttgtggcctcctctcccacctcccccatctctgctcattcctccagccaccctggctcccttgtgctgagcttgttctccctgccctgggccctctgccctcactgtcctctccacctggaatgctcttccttgatccatcacagggcccattctctccctttatttgggtttcagcacaaatatcacctttttctagaagctttccctaaccttcctccctaagaactcacgatccctgcccccatagccctacttatggcttggaaatcatttagttatttgtttatgtattgtctccttatattagtctgttttacgttgctataaaggaatatccgaggctgcataatttacaaagaaaagaggtttatctggctcacggttctgcaggctgtgcaagaagcgtggcaccagcatctgcttggcttctgtggaggcctcacgaagcttttactcaaggcaggaggcaaaggggaagcaggcacatcacgtggcaagagagggaacaagagagagagggcccaaacagccgtctctcgtgtgaactattagagtgaggactcactcattaccttgggtaaccaagccattcatgagggatttgcctccatgacccaacacctcccaccaggccctgtctccaacattggggatcacatttcttctcttttcttttttttacttttctttttttttttttttttttttttactacagtgtcttgctctgttgcctaggctggagtaatctcggctcactacaacctctgcttccccagttcaagtgattcttctgcctcagcctcccaaataccgggattacaggcatgtgccaccatgcccggctatttttttgtattttagtagagacggggtttcaccatgttggccaggctggtctcaaactcctggcctcaagtgatccacccgccttggcctcccaaagtgccggaattacaggcatgagccaccatgcctggctgggcatcacatttcaacacaagatttagaagggacaaatatccaaactgtatcattcccccatcagaatgtcagctccaagagagcaggaccgtatccatcttgttcatgctgtgtccataactcagcgcctggcacatagtagatgctccatacatatttgttggttgcatgggtgggtgggtggatagatggatggatgaaggcctctttgcttttcccacttccttgcagcaccacctgacctccttatgctgccctctctgcctctggcctgtatgtgtcaggggctacattcattcactcattcagtatagatccactgagcatctctgtgtagcaaagatactgaagtgactgagaccccctcagctctggccctcacagagcctcaggtctcagatataaaatataccttgatcagtgctgggagggtatacaggggacctgagctatctgggaggtaatcagggagagcttccaggaggaggtgatgtctaagtgcagcagtgttgcactaacagacctgggtccctatcctgcctacctttgacaggctgtgtgaggggatcttgaggtgtccctgattctcactgagcctcaggttccacactgtcaaatgcagcaacaatcccagcaaggcctagaacatggcagcatgtaggtaggtaaaggattggctggaggagaagactccatttgcacacgctgatttaattagtcgaggtggcccccaaggcagggccagcacagctaacctcaacagagagcacttcagagtgtgatcctcaagcctcttaccatccaggttcaaatcccaccacctaccagttgtgcagtctggagcttcaaggctcggtgcctgtttccccacctgtggaatgggatataatagctcctgtctcttagagacactgtggggattaaaacaggtaggacacatcaggcctttaggacaaggcctggcacacagttaacactcagagtgcgcctctaacatgattttatcctttctcagagcagcttccctggggggattccaacaatggctttcgtctgagaaccacattcacagattgatttccgcaattccctgatgccttcccctaccctgctccaattgggagcactaagcctgggtcactgcccattgtgcactgtgggagccaggcggtaaccatggcaacagacagttagaaactgttaccatttattgattggattcatattttttaaatctaaagaatttacacgtggccgggcgcggtggctcatgcctgtaatcccagcactttgggaggccgaggtgggcagatcatgaggtcaagagatggagaccatcctagccaacatggtgaaaccccgtctctactaaaaatacaaaaattagctgggcgtggtggtgcatgcctgtagtctcagctactcgggaggctgaggcaggagaatcgcttaaacctgggaggcggaggttgcagtgagccgagatcgcgccattgcactccagcctggcgacagagcgaaactccatctaggaaaaaaaaaaaaagaatttacatgcaataaagcctcactgaatcctcaccacagccctgtctgtgaggcaggcccctggtcaattgagaccttacagatgaggccactgaggctcagagaggtgaagcgatagaccctgggtcacacagctcacacggagcaaagccggaagaggcacttggtctcctgcttgcttaccccttgcagcccacaccccaccattcggccttccagctcttcatgctcctctcaggccctgggggaggtggggacaagggtccctgcatgaatgatggtctccacctatctcccaaccacctctccattctgtacttcccaccccaaggtaagagctggggaagtgttggatgggcgtggactgtcactgtcacctgcagggactggaactgtgtcgtgtggtggccgtgcacgtggagaacctgctcagtgcccatgagaagcggctcacattgccccccagcgagatcaccctgctctgacccagcccccagccctccagtaccttctgccagaagactcactgtgtggcctcagagaaatcactgaacctctcaggatcaatgacccctgtaaggggccagagccttggaggacactaagaggaggcaggaggagcaactcaaatccccaagaacacaagaagacccatcctgaactgggatggaatggcagcatgcaaacttggatcagatagcaggaggaactttcaaaagtctggcccactgtgcagtggagcagaaggcaggaccatgaggcctcctgccatgtacccattgcagaccctgcccctaactcctgcctatgacacagaagccccacaccagttgcccagatgaactggcctctgcctttggtttactcagggtctgatgttggaatctgctccaactccacaccctagcccttacatgtcctcctaaggggcccctccttgtgctgccagtcagcctggatttctggtctttggttatttctgtgcaaacaaaaggtgtgcctggcagccatttctccatggagttgctaagtggccggaaaacaagcctgagggaggaggcaggagttggagttaccttaggcccctgattcactgcctatgaacagaccatcccccactccttgggtatccccaaccccagacccccatcacttgatgggccacacaagtttgagagtggtacaagggagaagtttgggaaaagccttcttggaaaatgggacattagcattgagttttgaaagatgagtaggagtttgctaagaatagatggaagacagcaggataaacattccagagaaaatcatgtttattccctgctgtatcttccagaacctaggaggatgcctaacagagagtaagcacttaaaaaatatttgtcatatgaatgaaaaaataaacgagtgaatgttgatagaaagtgctggtgctttggggagcttgtgcggggcagagaacacttggggagactagataggtagatgggggcatagctgcaagatccatggcagcagagaaaggatttatctacttattcagccattcaatagctattaaatacctactgtgaatgaggcaaataccaggcactggcagttaatcacagtcaaatcaccgcaaactaggataagacctgtgagtgggagttagctagggaaagaggaaagagaacaacatacgcaggggccctgaggtgcgcattacttgtagcaggatctgagactgaagaggccggcaaagatggtttcgatagggcttctgggctacattaagaatttaggatttctgggccaggcgcagtggctcatgactgtaatcccggcactttgggaggctgaggcaggcggattgcctgagctcagcagttcgagactagcctgggcaacacggtgaaaccccgtttctactaaaataagaataatatacaggggcagcctgcccctgtaatcccagctactcaggaagctgaggcaggagaatggcttgaacctgggaggcagaggttgcagtgagccaagatcatgccactgcactccagcctgggtgacagagtgagactccatctccaaaaaaaaaaaaaaaaaaaaaaaagaatttaggatttctgggccgggcatggtgactaacacttgtaatctcagcactttgggaggctgaggccagtggatcacttgagctcaggagtttgagagcagtctgaccaacatggtgaaacctctcctctactaaaaatacaaaaattagccggacatggtggcatgcacctgtaatcccagctactcaggaggctgaggcacaagagtcacttgcacccaggaggcgggggttgcagtgtgtcgagatcgcgacactgtactccagcctgggcgacagagcgagactcggtctcaaaaaaaaaaaaaatttagaatttcatcccaagagccatgagcagccttcaaaggttttccagagggggaaggggaggcacaacctgcacagactgtactttgttaaagccattctgaccactgaacggtgagtgaatgtaggagttggggagaccagagggggctgctgcagtgttagctggaaaacttgtcatagattctagtggtggtgatgggtggggagaagttggtaactggggagagattagaaggcccagctggcaggactagggggtcaatcagaccatcctgggatggagaggatcaagaaagagcccctgatacaaatgccacagggctgtcctgcttttcaccactgccttgggttggctttccccagaagcagaccccaaggtgaggaaagtaaggaactcaccagaaagagtgtggtgtcaatcaagttaccactgtgcaggggccatgcctggcagcagctcacttaacccctggggttctgcctgcggcgctgatgctcagtatagggacccccaaaacagagcacagtgggctccaacatgaggcagccctgaggcctgccctctgcccctcatttctcattgttgtgagatcatacatggtgtgtgtgagggggagggggtgtcaggctaattcttttgccccaaaaccttttccctagtcaagctgaactatgaggctcaggaagggatgatgtggcagagtgaaaacgagggggcccttttggctttcagaatacaactggggcctcccacacagactacaagcggcttcttggaagtagatcatccaggttgagccaaaatgtgaatcacctcttctctaggttgacacagcctctcccataacggacactgcattggaagcttccctgtgttcctccctgactgctcttgagctaggactctcccctctcggagccccggtgagggacagcacagattctggaaccaggcagcctgggtttgaatcatcactaggccacatactcgctgtatggccttgggcaagtcatttcacctctctgggcctgtttccctatatatacaatggtaataataataatgccctcctcattgaattgtttggacgattaattgggctagtatatgcacaggtcctggcacatagtaaaaacttgataagctttttaaaaaaatgtccattccaggctgggcgcagtggcttacgcctgtaatcccagcactttgggaggccgaggcaggaggatcttgtgcccagtagttccaagaccaatttgacaacatggtgaaaccccatctctgctaaaaacagaaaaattagcggggtgtggtggtacacgcctctacatagttccagctactcaggaggctgaggtgtgggaggatgtcttgaacccgggaggtcgagattgcagtcagccaagatcgtgccactgcacttcagcctgggcaacagagactctgtcaaaaaagaacgaggaggaggaggggaagggggagagagagagggagacgggtgataaggaactggcatgggcaacagccatggcaaacagcctgggcaaaggccaggaggtgagacacagtatgtttgtagacctggcttacaggatgaggaccaggctggggctcagtgtacatggaaagagaggagaggaggagccaaggccagaagagtcttgaagaaaagctttgagtgccaaataaagcaggggaactttatcctgggagacatgggagattttccagcagatcccccccgacccccatttgttggagccctccagtgcatcctgcacggctacgcctttttgttttgttttgcagctctgtcgcccaggccggagtgcagtggcgccagctcggctctctgcagcctcaatcccctgggctcaagggatcctcccacctcagcctcctgagtagctaggaccataggcgcgcgccaccacgcccagttcatttttaaaaattttattgtagagatggggttgccatgttggccaggctggtctcaaactcctgggctcaagtgatccgcccgccttggcctcgcaaagtgctgggattacaggcgtgaggccccgcgcccggcaacgcctttgctgactgcttcaaaacttttttgaattgactgtagtcattatctatagcttagccttagccttgcgcccgttcgtttcctggagttttcttccagagtccccgtaggaggtgcccccacgcccatctccagcaccaaggaggctcgacgccaaccccagcgcgcccccacgctcgccgtcaccgggacgtgactcgtgaaacgtccgctccgggcggcggcggcagcggcggcaggctggcttgtaccccgacaacgcgcgtctggcttctgccggacgttcctatctgggttcagaactggggccgggtgctgcaggtcccgcagtctgagaagttttcgcgggtttcagaagtttccttaggcgttctaagggctttactcaggtggagtctccattcaggcacttatttaaccacccatttctcctttaggggtcctcgctgctcgcccagccgctaattaagtgacggacacagtagctaaggagactgcctgattgacacgcatgattaccaaccgacttccggaaactccagtcagggcctgcccggcgcgtggcccacggcccaattaaagaagtggaagcgccaaagggggaggtaacggagcggcctacgttgtggcggttccctggtgaatgcgccctggggttgaggcgtctgcgggcgttcggacgatgccgtgacgcggcacggcgacactgttggcaatatgagcgcacccctgtagagggagcccttcggtcctggaggcggcgcggcgtgaagacaggttgctatttgagagcgttcccttgaagcccctcagagagtgggggaggggcggcggacggcaagcggttcctgtctgcgcttgcgccggcgcctctgccgacccggcctgcacgcacgcgcatgcccgtagcgcgcggagccgcggtggccggcagcactgcgcgtgcgcggtgaggagcccgctaaggagcggcgctggcggacgtcgggctggctgcccgtgacgtcgtgcggagagctttaaagtgcgggccgggccgggcgtccgagggtctggtcgggagtcgggccgcgtctccgcagcagccctccgcggcatgaggcgctgccggcgcccctgccccgcgggacgtggagaaggtggaggaggaagaagccccgttgtcgccaccgttgcatgacccgccgctcctgaggccctaccccacgcccggaccctcgacgccccccgccgggtcccccactcacgcatgggggttcggcgctaaggacccccctccctccgggggccccggggcgcgtccccttagagccatgcccggctgccccgcccgccccggaggaccctagagcagcgtcgtgggggccatggcggccgccagcggctacacggacctgcgtgagaagctcaagtccatgacgtcccgggacaactataaggcgggcagccgggaggccgccgccgctgccgcagccgccgtagccgccgcagccgcagccgccgctgccgccgaaccttaccctgtgtccggggccaagcgcaagtatcaggaggactcggaccccgagcgcagcgactatgaggagcagcagctgcagaaggaggaggaggcgcgcaaggtgaagagcggcatccgccagatgcgcctcttcagccaggacgagtgcgccaagatcgaggcccgcattgacgaggtggtgtcccgcgctgagaagggcctgtacaacgagcacacggtggaccgggccccactgcgcaacaagtacttcttcggcgaaggctacacttacggcgcccagctgcagaagcgcgggcccggccaggagcgcctctacccgccgggcgacgtggacgagatccccgagtgggtgcaccagctggtgatccaaaagctggtggagcaccgcgtcatccccgagggcttcgtcaacagcgccgtcatcaacgactaccagcccggcggctgcatcgtgtctcacgtggaccccatccacatcttcgagcgccccatcgtgtccgtgtccttctttagcgactctgcgctgtgcttcggctgcaagttccagttcaagcctattcgggtgtcggaaccagtgctttccctgccggtgcgcaggggaagcgtgactgtgctcaggtaacccacccgggtggagggggcggccctgcgcctgctgccttagctacccaccctggcccagaaagcagcagcccgtaggagtctgcgttttttacagttctgaccagttcttctgtttgtagattgtagggagcgagagaagggttttgtgtttaagatacctatagcaagaaaatagggaaccgatgtggaaatcctgtccccgaaggcaggtttgacgggatcactgacttggctgagaattcatcgaaagccatcttttcagaaggctgttccctttgatttttttttttcccaccatccatttcttagcataagtccctttgtgattttccggttttccattctggccttccatttacaaatctatgctttaaaattttttttttttttaatttatctaaaagtctttcttgttctgccatttttggattccttaacagagaaagtagtcacaggcaaaggccccagagattatttaattgaagcacattctccattcccaggagggggagtgacttccctggagttgaacagattagtggttgggccaggcatacagagcagcacactcttaaaattcttccctcctggctgcagaagagcccatcagttctttgtaagaacgtgttacttgtagtcaggactgaatacaacagaatacagctggtctcttgactgtttggccttacagttgcgtgagcagcagaacttaggcttttggcctatattcggttcccagatcctgctgagaattagctcagtgccctggcccccagaggagattgccattgggaacacctttgctgtttatgtgaagtgaaaatttatttggaagcggcctccttccagtcctgaaaaaggtaaacctagtaatgtaattcagtaatacccaaaacatcttaggtttagaccgcagctgttctcagagcagcttggttgaccaccaccaaatacaaggttgaggacacactgggcttttgtcgtgagcagcccaggttctgaagtgagtcagtagggccaaagtcatgaggagaagcagggtccctggagccttcttgatatgagattaggtcatctgtttcatttgagtctaacagctgaggctgcttccatgttggggatggcagcagagccttgtaatgtccaagacgtcctggtgggaaggtgggaagtcagtagtagcagaagcgatactttagctctttaggcatctgaaacttagaggacagcctagctgtcagatgccttcttataatgggcttctgagcttctcagatcttcatggcgctcctagatggatgtcttggcaaaatgctttaagatgggatttccaggacacaccctctccgggtgcttgctgtgtaaggcaggttggggtctgaccccattgacgggttctcagtgcaaaaattacctcacacaaggaccatttggtctcttagcgggatattaattttctgcgtagtcattggccctcagggtggttgtcaggaggtctagtagtggtctggtgcttaatgaggggatcacaaggcatttttttttggttttgggactactactctccttaacacatgcccaccctgtattttaagaacagaagtttcgagttcttagtatgcaggtctgttagtgatcagcaacaggattgcatcatcaggaaaattctcttcatcttttcctcagaatagtaaagtcctaaagctttcccagtccctgtcaaccctttctggattcagacttggctgtggtgttagtgtgggaggctcagccatgtcctgaaaagtgctgccccaggctttgaatccagcttttctctcatttgctttgggatcttgtaggcgttctctgagctggctttcccatctgtaagtggggatgatgccaacttccaaagcctattagaattaaatgtggtgatttgttgtctaagatagggcctggcacagggtaggtacttaaatgggtgcttgctttcatatacaaccactcagtgatcccctgctctctcactggggaaggaactagggatttggtggagcctgaaacatgacagtttcccttcgtgtagttcaagccccatggaggcctcagacaggaggataagttatagcccaggaaggtaactgcagaagcacactgaagggggacatcttttccactttggagtgttggaagtttaggggaggaaatgaactggaatgtgaaaagtgactaggaatgagccaagcagagaaaggtggagaaatacacaacagcagtgtctttggctgcagtagcaggagtagccataggtaagagggggtggatgttgatgggaggcagatggagttcattagtagagactgtggttgagggtgctctggtgaactctagatcagggcttctcaacagtgctattgttattcagggcttgataatgcttcattgttgaggctgttcgtgcattgtagactgttcagcagcattcctggcttctatctgctaggtgccaatagtgttttttatgacaaccagaaagtgtccagacactgccaaatgccgaggcaggggaagtgcagaatccttagttgagagtcactgctctagggtctggacccttccactaattaaatcttcttgcacctgcatacttagcttaccttggtatgcaggtgggtgaacacctgcctattagtagtgcccgtcgtcaaatcctgcatataaactggtaagaagtggtgctttctcttttcctggtacagatcctagcccagaggtgatgagcagtaaagctgcagattggaagggaggggctggtgaaaacagtggtgcggtgcagatggggagggattctagtagtaggcatcttagacttcagttggtgttggtggcaatggtatctgtacccctctaagaccgcatggcaagaatacaattttatatttaatagtgatcagcatggatgttggtgcgtcacaaacattgactcagcagtgtctaaacctgggcatttagaacaaggcctcacagaatcttctggaagtgcttcaaactcctttccaaacctagtcgtcagttgttttttgtaaccttcccatgttaggcctgggtggatcccctcttaaggctgtactttagggaaatattttttatcttcatatcactttatctgtcattcattctcctattccctgttggctgcatggggcagattaaaacagactctgattggactaattagaataattacttcaaggctaattgcttacttgctgctatctttaatcactgctacgtggtctgtggtgtggtggccacatgcccagagacccaggcctaggccagccgtctggaaatgactgtatcacccaggcacggggcatgcactggtgagctcagcctgtgactcttccagttaacggttggtattgggtggagtgggcacccctgtcagttctgggatagtctgatcttgttcagctggttgaaagcaaaatttagctttctggcttaaaatagttgggaaagtagggcagataggtcctgggccacatctcttgtgtggactcttctgattccactggagggggaggaaccacaggatgaagtcagggctgtgcaccgtcaggaggagctctgggccaggggggttggctgcccttgctgctgccagagcctgacaaggcagagggcagtaaaagaaaggaagctaacagtgaaccatggtgttaatcatgaagctcagagcaagcagagaataaataggccataaaaatttcagagctggccaggcttagtggctcatgcctgtaatgccagaactttgggtggccaaggtggacggatcatgaggtcaggagtttgagaccaacctggccaacatggtaaaaccccatctctactaaaaatacaaaaactagccgggcatggtagtgtgcacctctaatcccagctactcaggaggctgaggcaggagaatcacttgaacccgggaggcggaggttgcaatgagccgagatcgagcccttgcgctccagcctgtgctgtagagtgagactccgtctcaaaaaaaataataaaaaaaaaaatttcaaggccgggcgcggtggctcacgcctgtaatcccagcactttgggaggccgaggtgggtggatcacgaggtcaggacatcgagaccatcctggctagcatggtgaaaccctgtctctactaaaaatacaaaaaacaaaattagctgggtgtggtggcgggcgcctgtagtcccagctacttgggatgctgaggcggcagaatggcacgaacccgggaggcggagcttgcagtgaaccgagatcatgccactgaactccagcctggcagcctgggcgacagagcaagactccgtctcaaaaaaaagaaaaagaaaattcagagctggctggccagttggtggatagccttcactgatacagtgctagctctctgggggatataggttcatctctgcaaatctctttcatggggctagtgggtgtacgtgtgccctttggtgaggccagcaaggccccctggacaggcttgctaccaggaaacacagatgggcttttcttcctaccgcctccacaacaaaatccagaaagtttgacagcagacttggttggagttacagcaccaccattttaactcgttgacttcggggaaattaagctttttgaggcctcagttttcctcatctgcaaaaccagtctaatgatgctatagagttgttatagaaagttgaatctttgtcatctattgaatgcttgaaatttagctaaaagtgtctcaggagatgggctaccttctgtgtttagtactgtctatcttggtgtgtacagaattgggacttggcaggttgaccttccctctggattcagaaagccccaggacttcttataaagttaggccatgggtcgtcttggaggcttgggtctggtaaataattgagcctgagctcacaatcctgcccctgggtccaggtggctggtctgctgcccccaaaagcctgaccttcttggtcctgtgggtctgtcagtaaggcaggtagccatagctggagagagacagtcaccaggctgggatcttggacagtccctccatctctggttcatcctggcctaggcagggcatggagtagatggaaaatggtggccatcttggaaatgtgtcataacaactcagtttccaagaccgtcccctagaggagagatgtacagtcctgcatagtttctttaaagaatttttcagggccaggtgcggtggctcatgcctgtaatcccagcactttgggaggccagggcgggtggatcacctgaggtcaggaattcaagacaagaatggccaagatggtgaaagcccgtctctactaaaaatacaaaaattagccgggcgtggtggcaggcacctgtaatcccagctactcgggaggctgaggcagagaattgcttgaacccaggagctagaggttgcagtgagccaagattgcgccactgcattccagcctaggcaacagagtgggactctgtttccgaaaaaaaaaaaaaaaaaaaaaatttcagacacctcatttaatttgcacctaatcttctgaggaggggcttgctgtgatctttgttttgcagaggcagaaacaggttctaagtggtagaatagttcagctcaacacacatttcatttagtgtccactgtgcagggatgagtaaggcctttgaagagctttgtcttgaagggaagacacaatttccacaaggccagatggaatagcaaagaggcatgagagggtgtggttgagcaatgtagggggaacccagcctgggcagtcagggaaaggcccccaaaagaggagatagacatgtcagctccttcgagagtcactctgaggtataggactagtgggtgacatttgcaacatatactggtcagtgcctctggggctggggctgggggctcagcccagagagggagcaggcaagccagatggcataaggttatttcctcttctcctttccctgtgaaaacaaaaaagcaggaggtcctggaacttttcatgccagcagtagggctggacccaagggcatattaagttgcaagctggccgactgagactttcagacaatttattttgtagcaagtaggttccttaatagtaaataataccctgtggtctctgctcgacattttgtgagattggccaggagagcttcccttaatcaggactttgagctcatgttgccagagcagccggatattctgaggaaagggtcagtgggctgtgtcatagctgctaggaagttctagaagaccagtactaataagccttccaggttgggtcagtgccaaagtcatttttgtgggcctgtgcagccctacctccatactagttcttccaaggcctgggctccgtggcaggaacctgacatggcttattgtttgttctagagccctttgggggatggggtcagggagcatgcgggcagtcaagctttgacaaacatctggatttgctccagaactgcattaagaaaagtggttccttgttggagatgggaagtcagggcccttggttatgcatatagccaagtcaaacagattgataacacttgtcaatggcagggaaggttgcctgtagccagcactgcagattcaggacttagaaacgtgcctctggggccgagcatggtggctcacacttgtaatcccagcactttgggaggccgaggtgggtggatcacgtgtgatcaggagatcgagaccagcctggccaacatggggaaacagtcttcactaaacatacaaaaattagcctgtagtcccagttacttgggggtctgaggcaggagaattgcttgaacctgggacgtggaggttacagtgagccaagatcatgccactgcactccagcctgggcaacagagtgagactctgtctttaaaaaaaaaaaaaagtgcctttgagacctttgacagctctttgggaaagtattgtgtgtctatatgggacagtcttgcagtctagacccccattcccccagtgtggaatgataaaagcatgggatgagaactagagttcctagctctggaaatggggcccaggcggcccccactactggcagatccctgcagggggagcccagaccatgtctctttggcagatgctgaatccagggctctggcttgccccaggatagtccagggccctctgacttttgtcagagtgcttagtaaagattgtagggtgtcaggcaccctgcattatctgacttaattctcgcaatacccctgcaggtaggcctctcaccacccctttccaggagtgtcaaccaagtagtcatataatgctgtttttctgcctggaagggaggaggccccgtttttaaaatcttgtaatcttaaaaactttaatcttgtaatctttaaaactgtccccatttttaaaatcttgtaatattagtagcagcaaaagaatagctaaattataaagcataacaaaatgaatacccaagaacctactgttctccttattacagatgaagaaactgtacaggtttttaggttcagcatgtgatttaacaaaggtcacaaagctagtaggagacaaagctcacatttgaacccaggtctcttcaactcactaactcctgtgtggtacttctcactgtgggctgatgggtattaataggtattatgagagaaggttctttggtaagtgctcaaagtcagtgggttcttttgctgtagtaattctcatgtgctttaaatatattaatgctttttgaaactctaatcagtattttacaaattgatttcactgtagacattcgtccactgtctttttctttttttttttttttttttttttgagacggagtctcactctgtcacccaggctggagtgcagtggcactatctcggctcacggcaacctccacctcccaggttcagcgattctcctgcctcagcctctgcgatagctggaattacaggcacctgccatcatgcctggcttatttttgtatttttgtagagacggggtttcaccatgtcggccagactggttacgaactcctaacctcaggcaacatgcccaccttggcctcccaaagtgctgggtgggattacaggcgtgagccaccgtgcctagcctgtctactgtctcttatgggactggtgttcatggagaaaattttgaaaaattcttgtctaggagcagcttgagggagaaggtggatctataaaataaaggtttgggccgggcgcggtggctcacacctgtaatcccagcactttgggaggccgaggctggcggatcacgaggtcaggagttcaagaccatcctgaccaacatagtgaaaccccatctctactgaaaataacaaaaattagacaggcgtggtggggtgcgcctgtagtcccagctacttgggaggctgaggcaggagaatcgcttgaacccggtaggcagaggttgcagtgagccgagattgtgccactgcactccaacctgggtgacagagtgagactgtctcaaaaaaaaaaaaaattaaataaaataaaggtttgttctatccccagcatgagctcaaatcagatttccaaatcagaggtgcttccttaaggctgagcctgaagcagtctggctttttatctcttgttggctcttgcatccagttattagagctgaggtttggccagcctggccatcttgaggggtccttcccaggcctgcagtgtttttaatagttaagtttgtgtctgtacaactagcctttgagaagggagctgatcagcagccatgagagaagggtttgtggtacagggccaggtagggaaactaagccatacttgtcctactaggcttgtggctgagtttctgggtgtgtagaactgctgcagctcagtagagtaacttggagtgggagtatcttgtggctgccatgcttccagtgatagcatgtgaggggtataggaagctcagagcttgcttccagagtttcaaattggaatgacgctagctgagaagaggacagtcatctacccacattagttggtctctgagcggttttaaaagtcatgtaacttgttgaaaataaacagatatctgagtatgatggaaatcctttttttttgggcggggggcagggggtgggggtcagtggtggggacagagtctcgctctgttgcccaggtgcagtgggcgtgatcttggctcactgcaacttctgcctcctaggttcaagcgattctcctgcctcagcctcccaagtagctgggattacaggcgcccaccaccatgcctggctaatttttgtatttttagtagagatggggtttcgccatgttggccaggctggtctcgaactcctgatttcaggtgatccgcccacctcggcctcccaaagtgctaggattacaggcatgagccatcacgcccagccggaaattcttaaaatattcaaacacaactgtcttcaaaattttggatccccccaaatggagacttcatgtagatattctattttggaatgaggcagtcctagctctccctggtgactcagtgctatcagtggctgccttggctttctctacctgctaaatggagggagaatgaggaggagctacagtgtactctctggagtacccttttaaaaaagggttcctggcctgttcagggagagtcttgcttccagcctctgccttaagtggccaaggggtctcctttgtgtcataccaggtttttccttgagtattacagtctcttggcaaaagcatcctggaacttaatatgatattcccttccatgtagatccttgaaactctcaagtaatgggtagagagcagccgtaagacctaggccatgttcctgtcctgttatatcccccaggaactttggttgtctgtctactcttcatggtcacatgttctgtgtttcttttcagtggatatgctgctgatgaaatcactcactgcatacggcctcaggacatcaaggagcgccgagcagtcatcatcctcaggaagtaagtgccttgatgtctgaccttctgcctcacctgcaggcctgtctggagatgtagctctgggtccacttagaactcagctcctatgtatcagtggcatggcagagtggagagcagaactgttaagttctctttttatttgaatcctgtgaggataaagttgttttgttgttttatcagaaaattaagtactctatttagggagtttaggactgagcaaaagcatatacgcccaatatttgtgggtataatcttgagacaagatttgggcaacattcttccaaacctcaccccaccccttagcctctattcctcacctccttcgttcttatttgttacacgtactcttggtgattatttttagactgtgcctttagcagcctgctttaaaaatgcctgggttttcactgctggaaggaacagggagtgaagagaggagacaagggtgggaggttaggatgtagtattcggcagaatcatggcttgtggctcttctctggggagggaatcagggatgtgctacttaacatcaacaaacctggcttcaccagcatttatttctttcacggggtgagtggaagaagccatagcctcacagacattggatcaagacaagccttgccccactgtccacccatcttgctcaggctggaatgcagtggtgccatcatagctcactgcatcctcaaagtcctggactcaagctctcttcctgcttcagcctccccagtagctgggaatagaggcaagtgccaccatacctggttcacgcctaccttttgaatagagtcccagagaagataggtgattgcccagagtcatagaagtcagtgagcagagcaaaacaagcacgtaaacttaggcttgacccataaaacttgctgtctgtcgtcttcttccttccttccttttattaaactttattttttagaatagttttagatttacagacaattgtgatagtacagagttctcatgtactctgcatcccatttctcctatttgttaattttttattggtatgactaaagtccatactttatttagatttccttaggtttttcctaatgtcctttttctgtcccaagatcatcctacgttacatttagttgacatatcaactcagactcctcttagactcctcttggctgtaacagtttctcagactttgccttattcttttttttttttttttgagacagggtctcactctgtcgcctaggctggaataggcgggaatgcagtggcaccatctcggctcactgcaacctctgcgtcccaggttcaagtgatttcgtgtctcagcctcctgagtagctgggactataggcgtgtgccacaacacccagctaactttattttttcgtacagatggggtttcccccatgttggccaagctggtctctaacttccaacctcaagtggttcacctgccttggcctcccaaagtgctgggattacaggtgtgagccaccatgcccagcctgccttattcttgatgatattgactggttaggtattgtatagaaaatctctcaattagaatttgtctgatgtttttatggtaaagtgtatgccatttttactacataaccaagaatatatactatcaatgtaacttaacactattgatattgatcatctggccaatgcactgtcaggttttccactgtaaaattactgtttttccttgtccatactgtacccttaggaaggaagtcaccatgcatgcccacagttaaagagtgtgggagttagcaccatctccttgagggggagcatgcaggtgaattacttagaattcttctgcaggggggattggtctactctccttcatttattcaatcatttatttatataagtatattttttatgtaagtatggactcctaggaatttattttatgctcaaattcttccagctttggtcattgggaattttttctggtgcatcaactttagtcagtaaacaataactttggcatcctggtcctttgggcccataactccagaatattgtagtggtgaagtctctttggtatggctttgccactttgccaagtcaaaacttttagtctgttttaactatagtagatgggtatgatccatatctgtgggacagtcctatggtacaggcagagcagtgaacacgtgggagctccagaaacttgggtcaacttggtggggttggcagcctctcttttctagcctaagactgttcccagaatttgtcagaggaagggaagagtttttatctgccttgtactttatttttctgtgataaccagcataggcaagaactcggaaacaatggagtccagagtgtagcactcttccagcctctcctccagtcatttcttctcaggctgtacctggtacctccaactgcagccagggatgggtggcctgcccaggccaggaacctggagaggaacttctaatgttacatagaaccagagcagtaacttcccaagagttcctctcatcttcccataatagcttattttggggaaatcttagttggatgtgcaggtggtagtggccatagctggagtgtcagtcttccagctgctactcttttattgaatggtgactcccatacctggccgcccagtccaactgagtcagatgctcctcagcacagctaggagtctgcaccgttaatcagctccctgggaagcttttcagccagctaggtccctgccagtggcctgaccttgggaatggctgttactgggtgactgaagctcttctaccttctgacttcagtgggcccaggaaccattcacagactgggctggagtgcagaagcacagagctgtggtgtaaggggactggagaagagtgggaggatgtcccagcttccccaggtagctgagctggggaagtgcacagctgtggggaactctaaagtatctgcagctcctgttatggtttatggatttgtgcctgggctcttgtggcaatgtggcctccattgggcataccttctcatctaacatgttcatcctctgattcatatcccaactccccaaataaacctacatgataaccaactcctcagataacctagtcattcttcatcgttcagattgaccattttgacatgcagaaagcatcatataaaaagccctttagctttttagcatcacctaaagccctttcagcacacatgcagacacatacacacacccctgtttggactgtcacagctcatacgcttgccattgtgaattttcaaatctgcattctgtaggagtaaggagatccctgttcatctggggcctagcatgaggtgcagcccagaggaggcatcaactagtgtggagaacaattcaggccggtgaggagcagctccagagtagctacatgggtttgtcttgggaaaggacgggttgtgacaagtttaaaaaggggagcatcttggcccaggcattgcccggagataagtatgatgtggccttggaagatacctggctggtttgatgtcttctggtgaggttgtgttacagtgggtagaatctgggcattgagcctggccctgattatggtagaggagttagagccggtcctgccttctcataagttcagataaagattgcacaggctgctggtggagaccctgggagctctgtcaccagctcaggtcagtcagagctggaaaggtctttctaagggcctcacggaaggaaatgggtgggcagctgccaagtgctttctggttggacagaacgcagcttctgtgaacatgggtggtgccaagtcttcatgcacatgtgcccttgtttcttacggggaggctggaagtaaccttttaaaaaagtctccccagagtggaatcctcagactgtcccttggtgttataatgtttggggtcacaacttagccagtaaatggctgagtgacacctggaacctgggtcttgtggttcgttggtggtttgcacagtggagtaccccaagtcctgccctttcccccagtgtgtcgttgggatggatgctttgagttaggaaactggagctcagatatagaagggctttcttgcctctgctgtgcaagtagagagttgtgctgattggggagaatgttatgagtatgtagggggcactctacagagagtggggtgaggcagcagctacaggctagtcggctctttgaggtgcctcagcacccccaaacttccctgaatgttactgtctcccagccgaccgagggcaagctgccgcagcatgcaagtcttttctctgtaatcgttggtaaccctggaaggggaggctggacctaaccttactggaggtgtggttaaagttctaaattactagttagataaccaagaggctgacaaacttctggggtataataattcatctgtgaggggagtcttccagttttcccatgattccctagtgctcctgcactagtgcactctgtgcttctgctcctggtaggccttgctagctgccctgtgccaagcatccacatattaaccttgaaactagaaggtatgaactctgtttggaaaggggctcaggtaggaagtgagctgcctcaggtcattgctagttggaatggcctttgagcagggatttctgacttgagggaaacatcaagtatctactatgtacaaggcacttgaggtgggcaccgcaggaaatttagtgcccccttggtgcttcacatgtaataagtttgcactttgcctgccattccaacacaaagcagagtgaacactggtgtaaaagcacagggtattctctgggagccctgcaaaaaaaaccccaaaaacccaggccggtcgtggtggctcacacctgtaatccagcacttcaggagggcgaggcagttggatcacctgaggtcaggagttcaagactagcctgactaacgtgatgaaaattctaaaaatacaagaattagctgggcatagtggcaggtgtctgtgatcccagctactggggaggctgaggcaggacaactgcttgaacctgggaggcggaggttgcagtgagccgagattgtaccattgcactccagcctgggagacagagcgagactccatctcaaaaaaaaaaaaaaaattttttttttttttaaattacatccagctttgcgggaggaagggtaaaggtgagcttggtagatctggcccctgagctagaaattgctggccaggcagaaatggtaagctcaaaggctaggaggcagggaaatataggggacttctgtagatgaggaatgaaagagggaaggaggccttaggtcaacatttgattctcaagagatggcttatgggtcttcggggccttgagttggtgactagggcacccaatcccttggtttttaggaggccctcaggattgcactgtgagacttgtattcttgagattggtactctccagttaaccagataaagtggcacaaagcagtatatatagcccatttatttgcttttggtcaagtggaactcagctcagagtggtctgaagctgggaaatgcagctggagatccctttgccaagtggtaacctaagctggtgtgtgctaggctctgtgctagtacccggaatggggtttgtatgggttcctattctcttttgtcctttgggaaaaggcagacatttagcatctcaacaggaactggtcaaagaaggctttccagataagtgccacctgaaggtagtcaaggatgcttggaccttagccagcatagaatgaggctcaggggcaaagatagttcagtcagaagagatgctctttacagaggcttggagtccaggaactctgttctggaacacagaatagataaggagtggaggacttgatacaccggcctaagacagcaaaagcttcacgctgtgcagagaaatgttaagcgcgctggggagccgtggaggcatgtgagcagtggggtgagggatttgcatgtgagagattgtaggaagcgaagctcaatagcttacttggtcattagatccacagagttcgaggagtcaggagaccttccatgagagcagagcaatctgaatgtgaggctgagtggatggatgagcagtggaaggaagtggaggtctcattctggacctcgttcctcagcagtggggtgaggggtggctagctcttagtttctctgaccagggcttggtgttgctcctttctccatgatttgtgtctcctgtggttagatttagcttacatttgttccctggttcagtaagtctgtgtccacgtgcatacaccctgcccttttggcagcctgactgttctgatgtgtctgtggcctgcccaaggaatatgggtacaatgggatcaccaggaaggtgacaaacttgggcttctgccctggctctgccactcctctccaaatgcagtcttatctgcacctgtaaattgggcagttgtggttaaacttgtgaatgctaggtggtcttctaaactcttcctggctgggtgcggtggctcgcacttgtaatcccagcactttgggaagccgaggtgggcggattgcctgagcgcgggagtttgagaccaccctgggcaacatggtgaaaccccatctctactaaaatacaaaaaattagccgggcgtggtagcatgcatctgtagtcccagctacttgggagaatcgcttgagcatgggaggcagaggttgcagtgagccaagattgcaccactgcactccagcttgggctacagggtgagactccatcttagatagatagatagatagatagatagatagatagatagataggatagataagatagatagatagatagatagatagatagatagatagatagatgatagatagattgattgattgatttaaaaaaccaggtgtggtggcatatacctatagtccgagctactcgcgagcctgaggcaggaggattgcttgagcccaggaggtcaaggctgcagtgagctgtaatcccacccgtgcactccaggctgggtgatagaccttgtttcaaagaaagtaattaattggccgggtgcggtggttcacgcctgtaattccagcactttgggaggctgaggcgggcggatcgtgaggtcaggagatcgagaccatcctggctaacacggtgaaaccccgtctctactaaaaatacaaaaaaaatcagccgggcatggtggcaggcgcctgtcgttgcagctacttggaggctgaggcaggagaatggcatgaacccaggaggcggaggttgcagtgagccgagatcgcaccacagcaccccaacctgggcgacagagcgagactccgactcaaaacaaaaaacaaaaaacaaaaaaaaacagaagtctgatgttggcagggggctggtggaagatgggtggggagagtcccgtgaggggagtgggtactactgcaggagagccagcaaggtacagacctgagctttgtgggagtctgattctcaaaggtgctggagcttagaccttagctctagggacccaggttactaaataggcaagagggtgcttggacaggcccacaatactggtctctgcctcgctttgttggaaagccaagcttttagcacaaggatgcctggtaaaggtggtgccagacgttggagagtagttggtagctggctggggactgccctcgctccagagtcatcgtggcctgagtgcggtctggtttaccatcttcccagaaatggtggtgctgccacctgcatgcacagtgttctcttgcactgaggagggcccacctgcactttattttttaattaaaaaaaaaaaattagggccgggcacgatggctcacgcctgtaattccagcacttcgggaggctgaggcaggcggatcatgaggtcaagagatcaagaccatcctggccaacatggtgaaaccctgtccctactaaaaatacaaaaattagctgggcatggtggcgtgcacctgtagtcccagctactcatgaggctgaggcaggagaattgcctgaacctgggaggtggaggtgcagtgaaccaagatcgtgccactgcactccagcctggagacagagcaagattgtcttttaaaaaaaaaaaaaaaaaaaagagtttaaatagggacaaggtcttactttgttgcccaggttggtctgaaactcctggcttttaagtaatccttctaccttggcctcccaaagtgctgggattacaggtgtgagccactgtgcctggccccacctgtgctttagaggccatcacagagtagtaggtagtagctttgtgactcaagctagtgatttgctctgggatttagctttgctctccagtccctacagggagaataattcaccccagcagcttctctggaggacctaggataggatcaactccctcccttcccttcggttcacactttagtgctacagccatcctttgttgtgacctcccttgtccctgctttgtcctgacacggtaggtggccgctctgggtatcacggtcaacctcacatgcccgaggtcacatgcccgaggtgctttgctctgacctttgaatactgactcatctgtaaggcaggtcttcattcctgttgccacctgaggaggcctgggtccagaccttactgctagaactgagcctcctgaatccagatttgtgactctctgctaaaccctgaggacctggcctacgccatgagagttggttgccttttaacaggggcatgttctgaagttaagctactggtgggcactgggcttggagtcaagctctagcctggcatcctgcagcttggtgaatttttggaagtgtagggagggcaggagcttctccagctgttatgagatgtacttataacagtcccaggggatgtgtcaagagctctcatcttggtggctctgcttttctcctaccatccatcattcacccgaagaaacaactccagagtgcccccactagggcttcactggggcttttggggcacacaggggccttccttccctgaacatgggctccctggcacctatagagtcttagctttatgggtaccagaggagggactttcttcaatgaggcccttagagtcctttaagtcaagtataaaggctaacattttatttagtctgatttctgccacctggacctctcaacttgatgacacgaagcctggtaaagaaaaggtcattgggccaggcgtggtggctcacgcctttaatttcagcactttgggaagccaggacgggcagatcacctgaggtcgggagttcaagaccagcctgaccaacatggagaaaccccatctctactaaaaatacaaaagtagccaggcgttggggtgcatgcctgtaatcctagcaattcgggaggctgaggcagaagagttgcttgaacgcgggaggcggaggttgcagtgagccaagatcgtgccagtgcactccaccctggacaacaagagtaaaactctcttaaaaaaaaaaaaaaatagaaaaggtaattgggccaggtgtggtggctcaggcccataatcctagcagtttgggaggctgagatgggcagatcgcttgagccccagtgtttgagaccagtctggctaacatggtgaaatgctgtctctactgaaaatataaaaattagccgagtgtggcagcgggtacctataatctcagctgcttgggaggttgaggtgggaggatcgcttgaagttgcaatgagccaagatcccgccactgcactccagcctgggcgacagaaggagcccctgtctcaaaaaataataataaaaataaaaagctcatctggagccgggcttgatggctcatacctgtaatctcaacactttgggaggctgaggtgggaggatcacttagaagagttagagaccagcctaggcaaaatggtggtaccctgtctcgccaaaaaaaaaccattagccgggcatggtggcccagtcctagcttcttgggaggcttgggcaggaggatcccttaagcctaggagttcaaggctgcagtgagttatgatcataccactgccctccagactgggcgacagagcaaaacacgatctctctttaaaaaaaaaagaatggttctattctatttcacatactcatctctggtagttgcccagtaccacctctacccagagaatcccagccttgaaggaggcaacttgccttcgattccttagaccctcagcgcaaagaagccttagagctagtcacatttctttcttttgctcagatggggaaactgaggcccgaggagggatggtgactagcttggactctgaatggcagtgccaaaactagatcatcctcctgttgatgttaggttctgcatccatgagtctggaggagtccagagtggagtctgagactgaagagtcactcactgcagctgggccctactggcatccccctctgcaaggccaacccaaagggatggggatgcctgtcctacctgcctacccaccagtttgggcctgaggcatcagaacattggttcccagctggaaggaaggagatgcccctgctgcctttaggagagagatttcctacccacgttcagagtaactcttgcctgtcaggcttgaagtctcactttggctttaaactttcccccgtgacttgcaggatgcatgacttactgcctttctgatccttcccatctatgtacagtaggccagccagtggaatgtggagaggcagccatggggaatgggggaaactgaggaccagatgcagttgttaccaaggatgccaagcagcctagcccaaggcagttcttggatttccctcctgcttacttctccccagcatcctctagtatccttagagtcctgctctgactgcagcccctactccttcggaactaagttactactttgtgtctagcagaccctggaaaaggtgccttcagggtctctgctagctatgtcctatcgcttcccacccagtctattacatgggtccttctgccctttgctcccacctgcctgacttgccagccttctctgtaccacacaaggagcctgagggctttgaggttttccatgccagctcccttctgttctggcttcataaaggacttggatcactgccctgagttaccgctacccagcttctccatccccctcttcctcatctgtatttgtgtgccttccctttactaggcagtgtattccttgaaacctatggctacacctgctgcttggtggggactgtgccttcaaaagccctctggcctttaccttgtcagcatcctgaaatgagcagaaactgccagatgactgctcatggttgtggagtgggcctgggttccctaccctggctctgccactcagtctcagcatccctgtctgcacagtgagaagatagggtagctctggctctctttctctccagcccctctacaggcctggaccagggatccttcctgtgttgggacccaccagtggggccgttggtcctctggcaaatgaagtagatggccccagagaacctgtgggtccaagtggagtgaggtgaggctgcttggttcagctaagagcgagccctgggatcttgcccctagggtagcacagcctgtcattgggagtttccagacagaagtgttcccattccttactcctaaaggtggacttgaggagggtctttgaaagtcagctagaccaatctctagttgaacctcaaggagagtgaggtacagagcagagactgctggcttccaggtctagctggctcccacttggcctggccagagaattggtctgatggtgcccacaccttcaccggaggccctttggtgaccccatgcatgtttcctttgcaggacaagattagatgcaccccggttggaaacaaagtccctgagcagctccgtgttaccacccagctatgcttcagatcgcctgtcaggaaacaacagggaccctgctctgaaacccaagcggtcccaccgcaaggcagaccctgatgctgcccacaggtactcagtttaggaccctcagcaaaggctggcaaaggcctggctgcagggtgagaagggtggagaagcctggggtaggctgtttaggagccttggcttgctcaccctttcaaaaccttatgtctggttcctctgggttggtggcattggtgacattcccatctaaccctggccaactgcctgtacacccagagagaaggggtcaggcagagactgtaacagatggcaatatcatggctttcccatgactttccttgttcagtctcacccagacacccttgtggaattatacttagatgtcaggagggaatcttgggacttggataatagtgaaccagggacttatttcaaaaaggattggataaaaggtatttgaggagataattttttttaaaggaaaaaaaatgttttggccggcacagtggctcacgcctgtaatcccagcactttgggaggccaaggcaggcagatcacgaggtcaggtgatcgagaccatcctggctaagacggtgaaaccccgtctctactaaaaaatacaaaaaattagccaggcgtggtggcaggtacctgtagtcccagctcctcgggaggctgaggcaggagaatggcgtgaacctgggaggcggagctggcagtgacccgagatggcaccgctgcactccagcctgtgcgacagagcaagaatccgtctcaaaaaaaaaaaaaatattttttaagtgttggggaaggtttccaaggaggtaatgtttaagttgattccagaaggataaggaagacatggaagagcattctaggcaggaaatactgtatgagctaaaccctgagatacaaaagagctttgtggtttcagggggtaatggggttagtaagtggagaagggggtgttgggaggcccaagagagagaaagtgggtagagctgggaagtaaaggtagatggcagaaccatgcagagtcttgaggctgtggtagggaagacctctgtccagcagccctggcagtgtcccagggcaccagactccaagccaggcagaccccacagggtaattgggaaatgtcccaaagactgggatggtcactggcacttagtgggcaagaacctccgataccagggcctctgccaggactacccttcgttgaggaccactgagctgaagtgacccatcccaaggatgagacgaggtacagcggtaaagccaggcgcctcctgccagcctctcagataacgtcctacctccctttccttgcaggccacggatcctggagatggacaaggaagagaaccggcgctcggtgctgctgcccacacaccggcggaggggtagcttcagctctgagaactactggcgcaagtcatacgagtcctcagaggactgctctgaggcagcaggcagccctgcccgaaaggtgaagatgcggcggcactgagtctacccgccgccctcctgggaactctggctcatccttacgtagttgcccctccttttgttttgagggttttgtttttgttcattggggggtttttgttttttgttttttgttttttttgattctatatatttttccttggttttgttgcctgttagggctgaagaatagaattggccaggacctaggttctcatattcttggtattcctcctggatggaaaggctgttggcatcaataggggacagaggctgatgctggagtggccagtagaggtggtggagcagagcagccatcttttaagtggggctgtatcaggctgggtttatttaaaagcaacaaaatgttttggttaagaaaattattttgctttcagtgtaaatcttcgcagtgttctaaacaaagttcagtcttctgctcgcccctttccctcactgatgtctgcacttggttgaggtctcctggagcctcacaggctctgctgttctccacttctcacctgccatccacgccctgcaagctcatgcaaacaccctttcttcctcctgcggcagagttgttcaggttgcctgggcaggggcttaaacagtgccagcccctgccatcccaaagctattgttaagccccccaggcgtcctccacccacgcccactagcctgccatgtccacagttccttgggctgctgaggggctagtgcagtggtcctgacctctcttatcaagagcacacttctttgctggttgctccttttgagcatatgcgtgtgattatttggaacagttagacttgccacgttgggtcagttttagaaattgtttctagctagagggactggtgtccttccaagtctagcatttggggtatggaaaattgttgtggtgtgtggtagggtttttgttttcttttttgagttttttttccccctttagtctcctggctttttcctttcccttcccttctccactggccagcttgggcctcatcctcatgtcatccttctaggaaggcgcctgccccatcttgtctgccggcagcatgcatccaaggccagagctcaggcctgcagactgggctggtgcctcctccgcttcagggtatgggagttggtgaaggggctttcaaaaaataataaggaaaaaaaggtaaagtctttggtagcttctatccactcagatcctggaaggcagcaaggttttgtggatctagattcattaggaatgtcttcttgtcagccaggccaggacccgggcttgccaagagcagaggccctcccagcaaccaggataccaccactttgggggctttgtgtacagaggtccgggtctgagacctcataggctgcagaaatctggggcagccaccatcaagaagcccctctcaggggccagaactcctttgccagcgtggatttctcaagtcgggactgcataattaaagcagttgcagttttattttttttacagcttttttcccaaaaatgatttgtagttgtgtgtgcagcacttcgccctgatatgtgtgctctacaataaaaaccaaatctaatatattttgaaacagttgtctgatgttgttgtaagagagggcttgcctttggtgcttccttaatccctttactttcttaaacttgaaacaggggttggggaggcagagctagctcattggccgccagcgtcccagaggagttggttggtcttggacactgggcctcctgtgtgcctagccttgggtttatggctgaaggtggacttgccctcaccccactgtcctttctcccactccaaggagggtgaacttcataaaccacaatgtccaggtgcccagggaccacaccttctggagttctggaagtccctcttttagatatgatcactgagaggctggtgctggtgaagggggagatggcaggcacaaaagcaagggagaacctggcttttgtggaaaatatgcgagtgattttgctcattaaacaaatacttggccaggcacggtggatcacctgagctcaggagttcaagaccagcatgggcaacttggcaaaaccccatctctactaaaaatacaaaaatttagccaggtgcgtttagctgtggtctcagctactagtgagactgagacagacaagaattgcttgagcctgggaggcacaggttgcagtaagccgagattgtgccattgcactccaacctgggcaacagagcaagaccttgtctcaaaaaaacaaaaaaaaaaattcttgagttcctattgtataccaagccacactgggaccccaatagtgagcaaaactctggtccctcctttcaagatgctcatgatagtgtggagtgcaggtactggcatgaagcagatgtttttcaatgggtaaggctggggcccagagggctttagtccctccagacttcagacctggctccctatgcctggtaaagggcttctatctagagtctcttactctgttctagtgctcagagctagtctgcttggccaaattcttgctgtggaaacttggataagctgcttacctccacatttaccagagaagagagactccagagtggggcaagtaactggcccaggcttggtctaaaaactagtgcgagggtctgaagagagaggggccagagtctcaagtgtggtctggggctagttgggcctggaggggtagacactgggctaggcagagtggaccttggatcccctggagaaggaaacaccggatctgagagaaagtgacttgcagaatgtcatccagagtataaatggcagaagtaagcatcccccactccatgcctgagcttctgactcttggggcatgggataggggctcagagaagggctgggggagtgcgaggaaccgtctttgtggaggaccctattttccattgccattaaaaagtcagacttctggccaggcgcagtggctcatgcctataatcccagcactttgggaggccgaggtgggcagatcacgaggtcaggagtttgagaccagcctggccaacatagtggaaccccgtctctactaaaaatacaaaaaattagctgggcatggtggcgggcccctgtaatcccagctacttgggaggctgaggcaggagaatcacttgaagccaggaggcgaaggttgcagcgagccgagatcgtgccactgcactccagcccagcggacagtgcgaaactccatctcaaaaaaaaaaaaaaaaaaaaaaaactcccagcctgaccaacatggtgaaactccatctctactgaaaatacaaaaattagctgggcgtagtgctgggcgcctgtaatctcagctactcaggaggctgaggcaggagaatcgcttgaacccgggaggcggaggttgcggtgagccgagatcgtgccactggactccagcctgggcgacagcaagactcagtctcaaaaaaacaaaaaaaaaaaaaagtcagactcagccaggaacagtggctcatacctgtagtcccagcattttgggaggccaagatggatgagcccaggagtttgagaccagcctgggcaacacagcaaaaccctgtctctacaaaaatacaaaaattagccaggtgtggttgtatgcacctgtagtcccagctacttcagaagctgaggtgggagatcacttgagcccaggaggtcaaggctgtagtaagccgagatcgcgtcactgcactccagcctgggtgaccctgtctcaaaaaaaaaaaaaaagattcgggccgggcgtggtggctcatgcctgtaatcccagcactttgggaggctgaggcaggcggatcatgaggtcaggagttcgagaccagcctggccaacatggtgaaactctttctctactaaaaatacaaaaatcagctgggcacggtggtgcgtgcctgtaatcccagctactcaggaggctgagacaggagaattgcttgaacctgggaggcggaggttgcagtgagctgagatcacgccactgcactccaacctggatgacacagcgagactctgtctcaaaaaaaaaaaaaaggattcagcctcttcccaatccctgggtgaaaaaggcccttcaccctgtagtatggagagataggaggactagaggagggggctttggccctagcagttcctgctgtctctctacctgtacagtagcactctatctctgtaacataatcctctgagtagtccctagaactctacatctgattctggatctgcctgatctgattctggatctgcctgttcccagccatctcctagggcctcaggccaggtgctgagtcccatcaacccctgtccctagcccagtcttctacacagtagatgctctaacagctggtgccatccctcaccccgctaggaccccatcccattcctccaacccttttgtgtggaaggggaaactgaggcccagagaagttgactggccagaggtcacgttcacgcattcaaaaaatagtgtctggccaggcgcagtggctcatgcctgtaatcccagcattttgggaggccaaggcaggtggatcacttgaggtcaggagtttgagaccagcctggctaacatagtgaaaccccatctctactaaaaatacaaaaattagctgggcatggtggtgcgtacccatagtcccagataactcgggaggctgaggtgggagaatcacttgaacccaggaggtggaggttgcagtgagctgagattgcgcagtgctggagatacaagacagacctagtatatgatgtcatatacgcataaagttataaattttactgatgtgaagtatagcatataaatattatttttgagatggagtcttgtactgttgcccaggctggagtgcagtgagtggagtgatctccactcactgcaacctccgcctcccgggttcaagcgattctcctgtctcagcctcccgaatagctgggattacaggcacctgccaccatgcccagctaattttttgtattttcagtagagatggggtttcactatgttggccaggctagtcttgaactcctgacctcatgatccacccacctcggcctcccaaagtgctgggattacaggcgtgagccactgtgcctggccagcatttaaattattaaaacatatatattcttataaattccatataaccaatcttttctcacagaaatctattttagtttttttgctgaattactgtatttgtagtctgcttgtgcttataattcagccatgatatgacaaagggacttgcatcatacctgcttgtaatagtttcccgtggctgccataacaagtcaccacaaccctggtggcttaaaacgacaaatttatttctctcaaattctgggaaactcaacatcactgggcttgcctgtctagtggaaaacctgttctttgcctctgacagcttctgttagctgttaacattccttgacttgggaacgggcagattcacgtctctgcctccatggtcacatggcctcctcctctgtgtaccacatctcctctttttttttttttttttttttttaaagacagagtctcactgtcacccaggctggagtgcaatggctggatcacagctcactgcagccttgacctgccaggttcaagcaatcttcctgccttggcctctcaaactgctgggataacaggtgtgagccactgtgcctggcttctgcctctctcctaataggacattcacgattggatttagggcccctctgtcacccaggctggagtgcagtaacatgatctcgactcactgcagcctcaaactcctgggctcaagtgaccctcctgcctcagcctcccaacctcaggtgtgcacacaccactacaccctgctaatttctttaaaaaaattttgggccaggcgcggaggctcacacctgtaataccagcactttgggaggtggaggcgggcagatcacgaggtcaggagatcaagactatcctggctaacatggtgaaaacctgtctctactaaaaaatacaaaaaattagccaggcatggtggcgggtgcctgtagtcccagctactcgggaggctgaggcaggagaatggcgtgaacccaggaggtggaacttgcagtgagctgagatgcgccactgcactccagcctgggcgacagagcaagactccgtctcaaaaaaaaaaaaaaaaaaaaaaaatttgtaggccgggcgtggtggctcacacctgtaatcccagcactttgggagaccaaggtgggtggatcacctgaggtcaggagttcgagaccagcctgcccaacgtggcgaaaccccatctctactaaaaaatacaaaaagttagccaggcttggtgggcgcctgtaatcccagctacttgggaggctgaggcaggagaatcgcttgaacctgggaggcggaggttgcagtgggccaagatcgtgccactgcactccagcctgggcgacaagagcaaaactctgtcctcaaaaaaaaattttttttttgtagaagacttcacactgtgttgcccaggctagtctcaaactcccagcctcaagtgatcctcctgccttgtcctcccaaagcactgagccactgcacccggtcccctatgtaatgatgtttaattatattcgaaagaccctttttccttatgaggtgacattcacaggtcccagggataatgacccgatatttgtggaggccatggatcagcccctacatgcccttctcccagtaaagttattgccattaaatctgatatatcatctgctttctcatcctcaaatattagttggattaaaatttctcagctatagcagtacttttaaatttaatctgaatcattaatattttccttcactttctcttttttttgagacggagtcttgctctgccgcccaggctggagtacggtggcatgatctcggctctctgcaagctctgcctcccgagttcatgccattctcctgcctcagcctcctgagtagctgggactacccgccaccacgcctggctaattttttgtattttttagtagagacagggtttcaccgtgttagccaggatggtcttgatctcctgacctggtgatctgcccacctcggcctctcaaagtgctgggattacaggcgtgaaccaccacatccggccctcttcatcactttcttaaatctagacctgtgttcttcagtacagcagccactgatacttggctattgagtatttgaaatgtggctagtttgaattgaaatgtgcttttagtgtaaaataccagaatttgaagagttagtatgaaaaaaacaatgtaaatcattaagaactttatattgattacttgttgaagatactattttgagctgggcatggtggcctacgtataatcccatcactttgggaagctatggtggatggattacttgaagtcaggagtttgagagcagcctgaccaaatggcaaaaccccgtctctactaaaaacacaaaaattaggtgtggtggcgctcgcctgtaatcccagctacttgggaggctgaggcaggcttgcacctaggaggcagagattgcagcgagccaagatcgtgccactacagcctgggtgagagagcgagactttgtctcaaaacccccccaaaaaagaagaaaaaaaaaactattttggacatatgttaaatttggacatactgggttaaataaaataggctgaggcaggagaattgcttgaacctgggaggcggaggttgcagtgagcccgagaccgtgccattgcactccagcctgggcaacagagccagactctgtctcaaaaaaaaaaaaaaaaaaaagctatttaaattaatttcacctgttttctgttactgttatatctgggtactcaataatgaaaattacatatgtgtcttgcattatatttctgttggatggtactggtctagaaaactatagagctgggcacagcagcacaccctgtattcccagctactcaggaggctaagcgggaggattgcttaagtccaggggttatcatggctgattgcagctgatcaaggtaaggtcactgaacatcgagctgtgaagaaatgtgcagtaacaccccaatatatagtgtttccaccatacagatacaatagatgtaatccaagagtacagataataggaaaatgtggcaaaataagtaggaaatgcttagtttttaatattacccttagtttttagtgtaattttaattttatataattaatttttaatgactttaacaactgactcacaaaagttcttgaaaatttgccatttggctcttgcagagggctccagcacaccactagattcccatagagagtttgagcagaggagtgatgtgaacagatgtaggatcactggtgctgctgtgcagaggactgtcaaaatcaataagaaaaccactttcttagctgagtgcagtggctcacgcctgtagttccagcactttgggaggctgaggtgggtggatcacctgaggtcaggagttcaaaactagcctggccaacatggtgaaaccctgtgtctactgaaaatacaaaaattagccagcctggtggtgggcgcctgtaatcccagctgctcggaaggctgaggcaggagaattgtttgaacccgggaggcagaggttgcagtgagctgtgatcgtgccattgcactccagcctggacgacaagagtgaaactgtctaaaagagagaggagagagaaagaggagagagagagaaaagaagaaagaaaagaagagaaagagaaagaaaagaaaaggaaagaaaggaaggcctggcacggtggcttacacctgtaatcccagcactttgggagaccgaggtgggcggatcacgaggtcaagatatcgagaccatcctggccaacctggtgaaaccctgtctctactaaaaatacaaaaaaaattagccgggcatggtggcaggcacctgtaatcccagctacttgggaagctgaggcaggagaatcgcttgaacccgggaggcggaggttgcagtgagccgagatcgcgccattgcactccagcctgggtgacaaagtgagactccgtccccccccccaaaaaaaaaaaaaagaaagaaaagaaaaaagaaaatccactgtctttgtgagagatggaaaactaagggctcgggcagtgtcagggctggggtcctccagttaggtgtgaggcgcttgctgccgcagttcctcctgtgtccacagtgtggcagcatagcctgagtgatggtgcttcagagtagagggcaagggccagcagctgtcccttggtttggatggggaactgaggtccccagagacccccgaacctgccagaggttactcagagccaataacttaggttccccactgcttctgcccttctcagccagggatctcagggctagtagggttttcctcccacttccttactaatcctagtaggtgtggaggggcactgggacctgtgggtcaagcagatgccatcaggtccacccccaggccacacataacagcagtcccagcctgggccccacgctacctctcttggccccagctccttggagagttctagacatctttgcaagtgccagtactctgcctcaggcagctctcttccatgctaccttctctggccccctcccaggcttttcaggggtgcctttgggctcccccacccagaccggggcctcctttggcactgcctagagtgtactctgtggtcccagtgtttccactccaggctgggaaacagggccctaactcccaccttctcctgcactctcattgagtgaggccattaacttactgtctcatttaattctcgctgcaacctctgagacgtcatgaggggactaggtttacatcctgattctgcaatatactagctgtgtgactttgggcaagttaacctctctggcctcagtttcttcctttgtaaaatgggcataagattaaaggaataactagtgcctggcacagactaagtgctcagtgttaataaatggtagcaattaatattagcccgcatttcgcagatgagaaaacaggcccagagagggaaagtggcagaggcaggattagcacttggggcaccagagagaagtgaaacacaaagccccaccttccaacaggtctgtggtaatgtccacatacccagccccttgggcctcaatcctgacagtccttgcagggagcaggtgtgcccagatccccgttcctgtagcccagcatgagccaagaaaagcatactcaggatccaggctcagcgagtgtcagggctgagagtcctgcctccagagaaggagcactcggttagaggtccagggactcatatattattcacctgtcaccttgggcaggtcacttctctgaacctcagcttcctcccttgtataaaacaaggacagagtaggtcagccccaacactccccctacctgtctggcctttctttcatggaggcacacaacactattcactctctgtagattgaggaggccctaaatccattgctcccttctgtctggacctaaaggacacaagaccttattaagcttcagcttcatttgcataccacatgggatgaggtattcactcctccctggcttgggctggtctgctgaccctgtcttggagtctcagtaagcccaccctttctcccactccctcatctctctccttccatcctgggccctgcctagctctgtcccaacctagaccactccaggaattttccagcctgccagatctggccccccaggagccactaggaagaagttgagtccgtggtttgggcagctcgagagggtcatggcctcagctgggatctgggccagcttctgaaagccagggcctgccttcttcagtcagactcttggttttcctcccacttccttactgaccctaatctacctcccttggagcttccccacttgtcgctccctgagatcaccctttctctttccctctgcagaggagtgaccaagtcacttctctacacgtatcttccatttactgtctataaaacagggttgttctggtatctatgaggattcagggagatatgcacagatatagcctttactggggcacctacgtccgaagacaccttcaatgcatgccatcctgttcacctacctgcctacttacatcccatcaaccaccaaaccgccacttctgtggacttaactcctgaacagtatggattatttgttgttgtttttgtttgttttctttttttttttttgagacagcgtctcactcttgcccaatctggagtgcagtggtgcgatcttggctcactacaacctccgcctcccgggttcaagcgattctcctgcctcagtctctcaagtagctggaattacatgcatgcgccaccacacctggctaatttttatatttttatttttatttattttgttatttatttattttttgaaatggagtttcactcatgttgccgaggctggagtgcaatatcttggctcactgcaacctctgcctcctaggttcatgcaattctcctgcctctgcctccagggtagctgggattacaggcatgtgccatacacctggctaattttttgtatttttagtagagacagggtttcaccgtgttagccgggatggtctcgatatcccaacctcaggtgatccaccagccttggcctccaaaagtgctgggattacaggcgtgagcgagtgggcccggcaatttttgtatttttagtagagacagcgtttcaccatattggccaggctggactcaaactcctggcctcaagtgatctgcccaccttggcctcccaaagtgctgggattacaggtgtgaaccaccgtgcccggcctcagatctttaatctattttttaaaattgttttctttgagacggagtctcactctgtcacccaggctggagtgcagtggcgtgatctcagcttactgcaacctctgcctcctgggttcaagtgattctcctgcctcagcctcctgagcattacaggtatgcaccatcacacctgactaatgtttttttttttttgtatttttagtagagatgaggtttcaccatgttggtcaggctagtctcgaattcctgacctcgtattccacctgcttcagcctcccaaagtgctgggattacaggcgtgagccactgtgcccggctttaatctgttgttttaaatgtgtcgagcattaattatgtgccaggcgctattctaggcacagctggttcactaggaacaaaccctgctgggtcctgtgctcaactctttttttgagacagagtctcgctctgtcgcccaggccggagtgcagtggcactgatctcggctcactgcaactgctgcctcctgggttcaagtgattctcctgcctcagcctgccaagtagctgggactacaggtctgtgccatcacgcccggctaattttttgtatttttagtagagatgggttttcaccgtgttagccaggatggtctttatctcctgacctcgtgatctgccctcctcggcctcccaaagtgctgggattacaggcgtgagtcaccgcgcccggcctcaaatcttgttttgagtcatctcatttagtccttactgcattttacagatgaggaaattgaggcccagggtggactcatggtttagctgaggtcacccaatgagcaaggggatgtcttgggatttgaaggcggactccagagctgggtgagagccctatgggagcctaggaggaggtgagaggagggggacaccccaccaaggaaatgccgagaaggcagcccccccctagcctgagattgacctgaggctgggaggctgaaggaagaaccagcttcccctgccagtgctgctgactcaggaaccctcctgcctcccccagctccaaggatgggtgggcacctgagatgaccgggaccctgtgttcagttgtttgtctgggctcccctgaccctcagtttcttgttctagcaatgagctgacttggcatggccatctgtgccaatctctgccccctggggctgctgtggtaatcataggcctgggctgccctgacttgcgggggaggggacagaaaaacagtcattagtgtcccagaccctcccagcctgggagatggtgccctctctagtgccatttctgaaccctgcctgatggtatgggtaggctgggcctacatgcccaggcctcagtttacccatttgtatctgtatacccatttgacccctcttaacctgatcagatggggccaagctaggcctcagggtcatttgggaaaggagctggtttaaaatccagattctggggccccactcgcctgtcattcacatttgcaggacctagaatctgaattaacaagtgtgtgtgtgttgtggggtgggggtactgacactttgcgaatccgtttgccatgagactcttccctgcctatcccctggctccttccactaggtacactccttacccattacaacccatgtgcactgtcctctcccagcaggacactgaccctgggccagatgcctcttctgggctcccacagccccagtgcatgccccatcataggacggtgagctatggttagctgtggtctcgactcagttctgttgccctgctccccaaaaaactgtgagataggggttgggaaaggcatggctgcttactgcctaataaccaagtcccattgaaaaatggggactgctggctgggtgcggtggctcacacctgtaatcccagcactttgggaggccaaggcaggcagatcacgaggtcaggagatcgagaccatcctggttaacacggtgaaaacccgtctctgctaaaaatacaaaaaattagctgggcatggtggcacagacctatagtcccagctactcaggaggctgaggcaggagaatcgcttgaacctgggaggcaaaggttgcagtgagctgagattgtaccactgcactccagcctgggcgaccgagtgaaactctgtctctctgtctcaaaaaaaagaaaaagaaaaagaaaaatggagattgggtgtcgggtgcaacggctcatgcctgtaatcccagcactttgggaggccaaggcaggcggatcatctgaggtcaggagttcaagaccagcctggtcaacatggtgaaacccggtctctactaaaaatacaaaaattagctgagtgtggtggcgcatgcctatagtccgagctacttgggaggctgaggcaggagaatcacttgaacctgggaggcagaggctgcagtgagccaagatagtgctactgtactgcaatctgggtaacacagcaagactccatctcaaaaaaaaaaaaagaaaaaagaaaagaaaaaggaaaaaaaggctactccataggcagagttgtcctttgtttttttgagatggattttcactcttgttgcctaggctggagtgcagtggtgcaatctcggctcactgaaacctccgcccgccgggttcaagcaattttcctgcctcagcctcccgagtagctgggattacaggcatgtgccaccatgcccggctaatttggtatttttagtagagatggggttcctccatgttggtcaggctggtctcaaactcctgacctcaggtgatccacctacctcggcttcccagagtgccaggattacaggcgtgagccaccgtgcccggccaagttgcctatttttgtggtcatttcctgatgatatgctaaacgtggattattcatatctcccctttttagaccatatagagtaacttcatgacgttgccatgacatttgtaaactgtcatggcgctaatgggagtgtagcagtgaggatgtccagaggtcattctcgtggccatcttggttttggtgggttttggccagcttctttactgcaatctgttctatcagcaacgtctttatgacctgtattttgtgccgaccccctcctagctcatcctgtgacttagaatgccttaaccatctgggaatgcagcccagtaggtctcagcctcattttacccacctcctattcaagatggagttgctctggttcatattaccctgacacatttaatctccacaacaaccctttgaggtaaatactaatattatcaccatttttactgatgaggaaactgaggcacagagaatttgaggtaacttgttccaggtcacatagcttccaaatggtaaagtgggaatgtgaatcaacgttttttttttgtttgtttgtttgtttttttcatttatcacgcttgttgcccaggctggagagcaaatgatctcggctcactgaaagctccacctcctgggttcaagcgattctcctgcctcagcctcctaagtagctgggactacaggcacctgccaccatgcccggctattttttgtatttttagtagagactgggtttttcccaaactcctgacctcaagtgatttgcccgcctcagcctcccaaagcgctgggattacaggtgtgagccactgctcctggcctttttttcgagatggtcttgctctgttgcccaggctggagtgcagtggcacgatcacagctcacagcagcctcaacctcctgggctcaagccatcctcctgcctcaacctcctgagtagctggaatttacagctgggccaccatgcccagctaattaaaaaaatatttatttattttttttctgtagagatgagatctcaccctactgctcagtcaggtctcaaactcctggggtcaagagatcctccctccaaggcctcccaaagtgctaggactacaggcatgagccaccgcgcccagccagcaacttcttaacacttcctgtgtgaggcagggcagggaccagaacccagacctctgagctgtccctgctgcctgtgctggtgtggcgtggccagtggccaaaggggtctcatcctcctcagtccagcagctctgccaacaactaacagcctttggctgatggtctcagcttcctcatttgggatgggtaatattgttggctccctcgtagagctactgacagcactaagtcagctgaaaccaggaaagggctttgaacagcgcctgccccgcagtagacacttaggggctttactgtcgtcattctccctcctctcacctcctcactcactcctgggccctcttccggatccagccccaaatacggggaagggctgaacaccgccggcctggcgtgggtggagggggacagccaggccccaaggcttggcagccgcctcgggctcagaggtcagctcctgctccctggacacagctggtggggttggggcctgtcctacctgccccacctaagcttctaggacctcccgcagccccagccctgagccaggcggcctatcctcagcctggaaggaaaggttcagcctcgaggccattgtccagatgagaaaaggcctgggaggtgggtggggacaggcagacggcccctgagagtaggggcagggctaagctttgttcagacgctgttctctgcggggggaggtccttcccccatctccgtaaagctccaatccaaccccagaacagtcccaaatgccacctcctggggatcccgtctctttctttggctaagaaagaatcccctgtgctgtgacacagagccttttgcgttgggtcctgaaagatgtgtaggagttccccaggggctgggggtgaggaaagaattcctgactacaaagccaaggcaaaagcacggcggtgggaggtgctctgacagagcggggaacagacgaaatggagttctgtgaaattggtaaaatataaacttggcaatcacttgaccaatggtgtagatggggaaactgaggcgcagaggggccagggagttgttccagtcagagctgtcttggctttcggaacagggctgccccattacatgagtgggcacgtcgctcgctctctgggaggaggaaaaagtctcctccaagcccgggaacgtgcgccaatccccctccaaagcgcttccccagccgcccgcgctggagccccggctcatggactacaagtcccggcaggccccgcgccgcggcgcatgctaggcgggcgtcccttcgcgagcccggccgagcccgggggcccagttcaccattgtctggccaacaggggcggggcgggcggcacggcgggctcgctcactggtcgggcggcgcgtccgtcgcgcccggcgcccacccccgtgcaggcccggccccgcgcgcccgcgcccgggccgcctggcgccccgcccgcgccttaggacccgcggggccgcgcggcgcatcctgcgggcggcggcggcgggcgaggcgcctgcagccgggcgcaagatgatgaagtttcggttccggcggcagggcgccgacccgcagcgcgagaagctcaagcaggagcttttcgccttcaacaaggtgcggcggcggcccgggcccgggctcgggcgggagggggcgggacgggggcctgggctgggggcccggggtcggagccacgtcgggcccggggggcgggggctggcatgcagcgcggcgcggggcggggccgggccgggccgcgcaccccctcggcgggccccgctctggctcggactctgggtgggtctgggtctccggccgactttccgtgtctgctccccgagtctctgcgggccgctctggccctggctctgccagtctgtgtgtgtgggggtctgtctctgagactctttgcctgtctctgggtctctgtccctctttctccgccgctgaccggctgtctcgccccagttgtgcctgtgtgtgtggtgggggtgtctctgcctctgccccttcctatctctgcctgtctccctttatctctctgcctctcatttctcttgctgcctgtgcgtctctgagtcttctttgcctgtctctccctgcgtgtctctctctctgtctctgtggagtctctcgacctctgtcgctcacttctgtctctttatcctttttcttaggggctccattgcgtccctgctcggcccttgggacagccctggggcccggtttgttttgtgctttggcacccaggagggtgagagagttagtgggggcgaggcagctgtggggggtgcggctgggaaatcccttcaaggagcctctccttccttcccccactgctccaggctctgccttgccctgctctgccctgcccggggctccgagtccaggggacatgcctggctgtgtactacactgcacttcgcatcgtggggcctcagtttccctagctgtgaaatgaggctacttttctccatactgtgggccctggctccctctgccacatgggccagctgtcctgcctttctgcaccaaggtggagtgaggtggaggcttttccttcctttcccggagtgggacactaggggccagggaaaggggccgcctcagcccccgcctccctctgcactgatgttagagcagggcctcagcccactcctggctcactgctctggggacgttggttttgtcctcattcttaccccagagcccactgatggcagagcctctcagtgctcttcgaaattagagttatcttcaaaatacaggtgagaaaattgaggttctgagaggggtgacggcttgcccggagtcagagtgagctgcaccaatatctttcttgagttcttgtgtcagtggggttggattttagccttgaggggcagggatttttccaaggggctgctgtggtcctgggccagtgttgtgccaggcgccctgggctgccttgaggagacacttgtcttggaggaggctctgggacggctggacctggagtagtggaggcactgggatgtctcagggtttccctgcctaggtctgcagtgattgccgatgagagctgccaggaccctcacacggtggctgagaacctgctaggaacctgagaggggcccagaagggaagctggtgctccgtggtccccagatggcacctattttctgtgccggggaggctgtgagggtgaggtgagaggagaatggcccttcagggaaaggcagcaacaggcacagggctaaatgtcacttttttttttttgaaatggggtctcactctcacccaggctggagtgcagtggcacaatcacagtccactgcagcctcacaactccctggctcaggtgatcctcccatctcagcctcctgaagctgggactacaggctcgtgtcaccatgcccggctagtttttgtattttttgtagagatggggtttcaccatgttgcccaggctggtctcgaactcctgggttcaagctatctatccatccatgttggcttcccaaagtgctaggattacagacatgagctgccatgcctggcctaaatgtcatttcttcagccagtgaattggggtgtgcagtgggggctggagacagatgggggtgaagctcagcccactctggctagccttggggtggcggaaagtaagggccctccgctgaggatgaagcgtgggcagcagtggtggaaagtggggtggtcttggggaagggacttagtcacctaagtgggtaataggtgatcgctagggaataggcccctgattcctgagcttagggggtgggagacaggtcaggagtgagcagggactttggactctgagtcttgggttcaaatcccagtccagcccacacatcgcctgtggaatgtgccttctctgttaatactgagccccactgtgtgtgaggtctccaaggtgctggggacaacagtagttaccaaaaaggacaaatacctgttaactcaggtggctgatatagttgtgcaggagacagtgaaaagccaaaacaaaaaagtaaaatagactgtagttgggatggtagccagtgctgtggatcaaataaagtagggcgagggggtgagaggtgtggccagggcggctgctgcagccagggtggccttgggaggcttctctgaggagattactcctgagcgacaggaagtgctggaggaagtgcgttccaggcagaggggcagtaggtgcaaaggccctgaggcacaagcctcccttagctgggagccccaggaggatcctgagcaggggagggacaaggatctggctgtggctttcataggatccctctggcctctgtgggaacagactgtagtgagtaccaatccaggcacgtgacggtggggcctggagcagggagggaggtgacttctgtgtgttttgaaactgagttgatggggctcagaaatggactggacgtggggtatgagggaagcagatgctggacagtgcatgtaacctcctttcctcgtttgtaaaatgggaaggctgtggggatttgcgatgcagtgtcccgtctctggaccctggttgtagcgagggactggctagacaaggtcaggtgcagcaagggcgtggtattattggtgggagagagaagccccagccaaatcgccaactctgtccttaggtgggcttactgtcccaagggcccagatgagagactgaagcttggagagtactgagtcttggagagtactgtgacttgcccaaggccagacagctaggccgtgaccaaaccagctgcccagagggctcagtccccacctggatgggcagaggcaggcagggagggaggttcgcgttacaggctgggaactggggtttcttacaaatgtgcatcttcctgaggcagtgggtcaggaattaccagtggtaaaagtgaaaaataaataacaacaacaagataaaaggagttaccagtggcccacgtgggtgtcctgcactggtgttcaggatggggctggagctcagctgtgcaggcttcccagggagggcacagccaggccaaagacaggagactggtgcagaaagggtgtgctgtgaaaggggcaggggagcgggtggggagctgtttcatcgacactctgggcacacagacccccttaacaccatctccgcccctgatggttatgggagtcatgttgcccagctgttggcaggtggggaggtgggaggatgccttcggggtccaggcagaaagctacccctctctgggcctctgtctccctgtgtctgggaggagtcaaaagcctctgcctagctgatcctggatgttgtcccttgacctctgacctccactcaggcctgtgtttggggagtgtcatggtcatcttgcgggactcctccgcaagctttagtctgtgcctctaaaaatggggtgcagagcccttcatggagcaggtggggcctcatcagtgcctgcacctctgtgagccttgcttcacctgtttgttgctggagcctccatgcagtggggcccacatgagcctgtgtgcattgaggggcacaggggcttggcaaagggcgggcctctgtggactatgcacgcggtacagtcatggtggaggctaggggtttagccacctccccaccaactggaggcatgataacccatttcacagttgaggacgctgaggcacagagcaagtagacctgcctcctacccccagtgtgtcagctgcagaccctggaggctgccttggggtgggcctcagggtgggccatggcagaggtgcctgggagtgcttacccccagcagccctcccctccttgcagactgtggagcatggcttccccaatcagcccagcgccctggccttcgacccggaacttcgcatcatggccatcggcaccaggtctggggctgtcaagatgtatcctttgcaggacaggtgttcagggtctgttcaggaccacctgcctgtagttccctgtgctctggggtcccagtcttggcagtgtccagctcgagaggaggacagaggtgctctgatgggcagtagtgggggcttctgcggaggttggcgtggcttctgtacctgagacaactgtgcagagatgatggggtccttttgctgagagacgggtggtggggggtcagtttgcagtagcacagctgtcccttgctacgtgtcagccagccagttacctaggcgaccctgccatcgtcccagcaactctggggaggccaggcagaaggctgggctatgatacccatggagggtggcaggtgggctgggggccctggtgagctgatgcacacatgtgtgaatgtgaagacacatgtgttcagcaaaggggcctgggggcagtgccaggctcggcatggtgagcacagcacggcccccacctggatactggctgctgcacaatgggctgtgtgagccacacaaagcgggcattttccctgcaggcctggggtgggggtgggggcaggccggcagctcagtgtctccttgccagccctggagaatcccaccccaactgctcttggggaagccgaggtgccagggtctggctgatggcggcttggtgaggggtgctgacccctacccctcctgtgtggccttctgggtttcagtatcctggtttcagacatcagttcccagaaaatgtgtcagtgctgggaaaggggagggtgtgggatgggggtctcctcaccccaggactgggggcactgatcaggcagggatgggactctgagcctgtggtttgtgagctctttgcctactctggggagtgtggatgggctgagatgtccccttctctcccatggccccagcggcctctgttggtgagtgtggcagtgctctgggccccacatgctccgctgcctggcctgctgctcccactcctgtgggtgctgcgctgcgtgcgcacatgtgtccctgcagccttcaggtgtccctcctgtgttggggtctccagtgcacttgtcctcaggctcaaaaagaacctgaagtgcagatgaggagactgagcctcagaaaggaggctggagcccggggtcctcttccctttttcccctgactgccactgcctggagccccttgggttgggaaactgaggctggagagggccagccctggtcactagaagctgcccctccccctgccaggccagccccatctccttgacgaccctggttcccgcccagctgctcctgtcccctcttttgtcccttcttcggagtttctcgccaggctcctgtagggaatctgagctcaagctccaggcaacggctcctgtgttgtcaccggggcaacgttgctgactcctccctgcaccctctgtcatggggccccctcaggccctgctgtccaccatcagccctggagttgccgggactcaggcactgacactgggcacttcaagcaggtcatccaccccctccaagtctgtgtgctcatctgtgaaatgggcaggctggagtctctcctccctcatgatggcagttgttggctgcctgctttggagggaggtgggttttttttgttttgttttgtttttttgagatggagtcttgctctttgttgcccaggctggagtgcagtcgcacagttttggctcactgcaacctttgcctcccgggttcaagcagttctctgcctcagcctcccaaatagctgggattacaggtgcctgccagcatgcccggctaatttttgcgtttttagtagagacgaggtttcaccatcttggccaggctggtcctcaactcctgaccttgtgatctacctgcctcggcctcccaaagtgctgggattacaggagcgagccaccgtgcccagaggaggtgggttttcttacccatggctgaagtttggcctgaagctgtgggaaaaggcagcctggactcttctgccccctggctttcttgtccaggcctggccttgcacctctggcctgcctgatcccatccggcaaggcgcagctcccagaacccatagacacacggagctgaagtggagcggagccccatcctctcaccaggctgaggccaagcctgctgggtgtgtttattctcacttgatctgcaacagtcctgtaaagtgggagtcactggcccaatttacgggaagtgaaggtcctatagcagcacctgacttgcaggagtgagtggagcctgcacactgatcttggggatactgtaggggtgcagagtgggagctttagggagggggcctccgttcttcagggaggactcctggatggtcaggcccatgccggggcccactggaatagtccgggtcaaggaggagccttgggtgtcttcctcactgtggtttgctggtctatgcctatttccaccttgacctgccaccctcagctatggtgcacctggcgtggagttcacaggcctgcaccgggatgcagccactgtcacacagatgcacttcttgaccggccaggtgagcctctgcttcccactagccagctccctgtggcccccatatctactcatccccctaggccagcctagttttcatctctgctcacacaccagggccgcctcctgtccctgcttgatgacagcagtctgcatctctgggagattgtccaccataatggctgtgcccacctggaagaagcactcagtttccagctgcccagccggcccggctttgatggtgccaggtactggagaacttggctggggccagccaccgggcagggaggatctgggggaggctgtgggaacctgctgtgcaaaggcagcatggagatgggcagcggttcagggcgggatgccttgagctgggcctgggtcccaggctgcagctgttggaccctgctttactgaggtatactctgaacttttcaggttaaatgggaggtttgggttgagtccgacgtgagcaggtaattaacattgtgagcagcaggaggtacatgcattatatgccaaacttctaggacctgaggcctggcactacacttactgcaatgatgggggtgtctaggggtttggggcagggcctaagccagttagtaacaggaagggtcccctggcctcttcagttgtgggtgggagacaggcctttctgtgcataggcagggttgagggcaaggagggtcccatgggctgtgcttggtaaggcgctggcagcatgccccagctgagtgagagtgtggggcatctctctccccagccctgcctgaaatagctggaaaaggggagtaccaacccagggatggattcctgatgcctcccagcttctgcagatgggggtatctggggccctcctgcgaagtcaggagatgtctgagcgctggcagcgggattcctaggaggggctcagcggggagctcctggtcctggcttgggcagtgccctggttcctgctgtcctctcctggtgggtgggaggagctgggagcccagtctgcaagacctagggaccctatttttatccatctccctgctgacatcctgatgaataattgagcgggctgatgatgatgcatgtcttcctggggtggctctgtaagtaggccctggtgagtgctgtggggccagtgatgagttatcagcagtggcccagcccctcacaccccacctgagcaggtggatgggcttgtaccctcactcccttccccttgttccctgcagtgctccgctcagccttacccgagtcacagtggtcctgctggtggctgccagcgacatagcagccctgggcactgagggcagcagtgtcttcttcctggatgttaccaccctgaccctgctcgaggggcagacgcttgccccaggcgaggttctgcgcaggtaagaggccggtgggcttcccagcacccactgtgtgcccgggaagttctgctggctcacctgccttcctccacagcgtgccagacgactaccgctgtgggaaggcactgggccccgtggagtcactccagggacacctgcgggaccccacaaagattctcattggctacagccggggcctgctggtcatctggaaccaggcctcgcagtgtgtggaccacatcttcctggggaaccaggtatgtaggtgaggcctgtgtcccctcagcctgggccccttgtgcatgcccaccatggctcatgcctgcctgcctgcctgcccctgcctgcccgcagcagctggagagcctatgctgggggcgtgatagcagcactgtggtcagctcacacagcgatggcagctatgctgtctggtctgtggatgccggcagcttcccaacgctgcagcccacggtagccaccacaccttacggtgagtgctggggacaccttagccagagggtggtgatgggagggggcaccactgagccaagccaaactggctgaggagggacttccccgagggggtggtctgggggcagtgtgtctcccgccgacttcccggggaggcaggaggcagctgtaaggtagagagcagtggagggcagagcaggaatggcagaattgctaagaaccaccagtgagtctggtctgacgctgtcccacccctcaggcccctttccctgcaaggccattaacaagattctgtggcggaactgtgaatctgggtaggtcgagggagtgggtgtccgatgtgagttgggtctggctagggggctggaagggtgggctctccctaggttgtgcagtatgtgctctggacccaagtggttcatggctcgcacacctccctctgcacataggggccactttatcatcttcagcggtggcatgccccgtgccagctatggtgaccgccactgtgtaagtgtgcttcgagccgagacattggtgacgctggacttcacttcccgcatcatcgacttcttcacagtgcacagcacacggcccgaggatggtgcgtgccctgccgtaccctaccctttcccagccccacctggtgccctctgccacctatggctgtgctcaccccatactccctccgtcccacagaatttgatgacccccaggccctggctgtgctgctggaagaggagctggtggtgctggacctgcagactcctggctggccagctgtgcctgccccatacctggccccgctgcactcctctgcaatcacttgctcggcccacgtggccagtgtccccgccaagctgtgggcccgcattgtgagcgctggcgagcagcagagcccccagcctgtctccagtgccttggtgtgtgcggcgatcaggggggtcttacagggtggagtcttgaggagggggagagtttcagttctaagcccggaggtcagaatgtgccatactcggggtgagagggagaagatgttcgtcctaaccttgtgcatacatctctgccaccccctcccagagctggcccatcactgggggccgaaacctggcccaggagccgtcacagcgagggctgctgctgacggggtaggtgtgcgtgcttatgtgggtgagtgggccccttgctgttgggggagagcccatcctgggcctggtgggtgcagaggtgccaggagactcaggcctggcccctggtgggaccaggtagttcctccttgcccaaggtggtttggaatgaaacctccctggaccttggttcaaggtgctgccctgatctgccttttggcctggaactgagctctaccaaaccccagggctccacccgcccagcctgcctgccctgggactggaaaatctgggctggcccacgctgagctgcccagggaaggtgccagagagcccagcgtgggcctggcgggcgctgacgtgcccagtgactcaggtctcaacttcctgccctgcccccactcccgcctgtgctgggaccctcaggcctctgactctggtgtgcccttccctgctgaagagcttgccgtggctttcagggctgctggaatgagtctcaaccacccccacagtcacacacctctcacgccctggctctgggctttcaccaccgcctggggccctgcttggactctgcagctgtgtcccaaggctgcgccctagatttgtctactccttcccctgccccctccctgctttctcccggcctctgtagtcttcctgctcctccacctacgtggctgccttgggccccatgcagctcctcccccgggatgccccatgctctgttctgtgactgccttactcttgatcacctctgatggctgctccagtgcaggcagaacccccaaagtcctctgttctctacatgtccccctttgccacctcctgttaatcagggtggtcatttccaccttgtttggtttaaaggctccaggtgcatatggtgcatgtggcctggcctataacaggtgcacagtgtacctgtgctgtctacagtaggtgcctattgttttttgtaaaagtaggattccggtcagtgtttggcacgtgcagtaggtgcttagtgagtggttatcagatgagtgaatggaggggcgtgcaggcctcccaggaactcgggtagccctgacatctgccctccctgcagccatgaggacggcaccgtgaggttctgggatgcctcgggtgtggcgctgcggccgctctataagctgagcacagctggcctcttccagacagactgtgagcacgctgacagcctggcccaggctgccgaggacgactggccacccttccgcaaggtgggcccctcccctggccctgatgagctggtcctgaccccgcctggactcattactccttcccatccctctaggtgggctgcttcgatccctacagtgacgatccccggcttggcgtgcagaaggttgctctctgcaagtatacagcccagatggtggtggctggcactgcaggccaggtagggctgggtgtcccctgggttggagatgtcagggagggctttctggaagagatgagctggagggtctggtggaaagggagatggactggcacaggcaaaagccaaggtgggaatagggctctgggtggggctggctggggtgaggacagatgggaagtgggcctgtcgctgggggaaccacagtgttgagaggagggaactcatgtcagtgctgtgctccggcactcacatgacatacaggaggtgctcaatgtgtccttattgctaaatgggagatagaggctcagggtaagggtggacactttgccctcagagggcagggactagtgtgtcttggtcaccactgtgttccttgtgctcagccagggccttggtatacagtaggcattcagtgagtgcttgtttagctgatgaactgaagacagtcctagaaccaccttggtggtggctggggctgcttcagaggctccaggctgagtggggcccagggcggcccctcccctgcgctgatgctccccctgcctggctgtgggctcaggtgctggtactggagcttagtgatgtgccggtggagcaggcggtcagcgtggccatcatagacctcctccaggaccgcgagggcttcacatggaagggccacgagcggctgagcccacgcacggggccgctgccctggcctgctggcttccagccccgtgtcctggtgcagtgcctgccgccagctgctgtaaccgctgtcacactccacaccgagtggagcctcgtggcttttggcaccagtcatggctttggcctcttcgactaccagcgcaagagccctgtgctggccaggtgtgtggggtggggccggctgggcagttggagcccccagcgagatggggtctgggcttccgtttccacctctagtgtttggtgtggcaaaggccactaacctccattgccctataagaaataacctggcagctccaagaaggacattctcagtaccacctgcagctgggtccataggactgcgccagaggggctgtgactccctgacctgggtgcctccacaggccagcaggagtgtggtggctgccccaggaggctgctctatagcacgactggaccctgtcttcccccaggtgcactcttcaccccaatgactccctggccatggagggtccgctctcccgggtgaagtctctcaagaagtcactgcgccagtctttccggcgcattcgcaagagtcgtgtctctggcaagaagcgggctgctaatgccagcagcaaggtgagctggggtgggctgcacaggagctgtgcctgtgtcctgtgccttggcctggctctggcctgggacccctggggcctgcttagctcagtgctcctccctcggcagcccctgggccctccagagggatgggtgaactaagctgggtggtagaggaatggtaacagaacgtagggcgcaaagcaggatgcaagccactggggtgctagggagacagtgttcaggagcccccgcccggcagttgcaggaagccaatgcacagctggctgagcaggcctgcccccacgacgtggagatgacgcccgtgcagcgccgcattgagccccgctctgccgatgactccttgtcgggtgtcgtgcgttgcctatactttgccgacacattccttcgagatggtaaggcaggggcaggggcagggacagggcaagggttgggggggctggcctcaattggccacctgggagatgggtggtggcaagggaggtggtgggactgcaccttccaggaggtggctgggcacggtggctcaagcctgtgagtgatcccagcactttgggaggccgaggtgggcggatcacctgaggtcaggagtttgagacccgccaggccaacatggtgaaacctcgtctctactaaaaatacaaaaattagccaggtgtggtggcgggcgcctgtaatcccagctacttgggaggctgaggcaggagaattgcttgaacgtgggaggcggaggttgcagtgagccgagatcgtaccactgcactccagcctgtgcaacagagtgagaccttctcagaaaaaaagcttaccatccagctctcccagggggactgctgggtcacccccagtctctctgggggagctggatggtaaaggatttttgagtgagctgggtgggcctctcagatctgagccaggagaagggaggttgaggcctggtggatgacggtgaggggcaccagccagtgcccaggccccgagccgggcatgtgtgtgggcagctgcccagccacttggctggagtggagcaggtgagggtcgaggtgtgtggttcagggagatactgctgctggccagaggctgaggacctggctttgattctcagtggcctgggagccctgggaaggtcctggatttgttgattgagtcactgattgattttgaacttgtacaatgggagagtttcaaacatacacaaaaatagagaggtgcaaagttgtcccacatacctcacatgcctgccaccagccatgtgcccctgcggattctgcccccctcctccacattctttgctgttttttttgccggggtattttaaatgaaaacccagatacaagtacttcagcatgttcctgacagatgtcactgacagccactgctcacatcatgccctgtagaaccaatgtgaattcctgagtgtcatctgcttggtctacgagctcagctttctgatgccatttatttgtcgagggtctttgtgcagtggattttctcactgtctggatgtggcgggtgcagctgggggtggggggttctttgactttttgttttttttgactacaaagacctagaagaggagagcctggggtttttaacttgttccactggcccgagaaggccgatgggttcatgttcatggccggctggggttcctgttgggcatgttttgagttgtgcagacacttaatgcctcaggatccatcgggtcatcagggagcaggtgccgagtctgctcttgcttctgctgggctgggctctgattctccactaaagcttgtcacccagaggttcagttcacacaggcagagcagggtcgatggatggtcgtcctaggtgtccccaggcttggcggcttcctctggctgccacgtagggagcacactgaagacagtgggggtgaagcagggctaagacaaggcacacctgtcgacaggactagcaaggggacgcaggggtggagagaggagtcggggtcttgtggggcttggggcctgagtgatgctaggatggagctgcgtttactgagatgggggctgagggtgcagtgggatggggctggaggtctggtttgggtgcccatcagcattctgtgcagatgcgctacagctgttcgggcctctgcaggagggctgcatcctgggctccgactgcagtcagcagcatagagctggggtctcaggcctcgaggctggaggtcaccagggaggcatggggcaggagggaatcagccctgagtcccagggtgtcatagttaggaagcagggctacaagagaggcagggagggacctgcagtctgtgggaagaccccaggggagatgcctggcccacagggagcaccctcctacgcgcttgttttctgcaggggcccaccacgggcccaccatgtgggctggcaccaactcaggctctgtgttcgcctatgcactggaggtgccggcagcagcagtgggtggtgagaagcggcctgagcaagcggtggaggccgtgctgggcaaggaggtgcagctgatgcaccgggcgcctgtggtggccattgccgtgttggacgggcgtggccgcccactgcccgagccctacgaggcctcacgggacctggcgcaggcacctgacatgcagggtggtcacgctgtgctcatcgcatctgaggagcagttcaaggtgagccactgtgggctgtgggggactctgggggactcccctccaggccccaacctcatggacaccattggaccctcaagaaacccttcctgcctgtatcccccactgttgggaccctaattcccttgcaccccagaaaacactcccagccagcagagaactcctacccaagaaccctgatgccccctcagcctgctgagttcccctgggagggcaggaatctagtcctatctcactgtgccacacaaggctcctgtactgggcccagacccctgagcccagtccccaggggctctgcctcgaaagaactcgaggtttgatggggataccagctgcataaccttggcataactctgtgattgattttgtcacagatcgagagagggcctgggaggtttctggagtacagtgtgaagtctggagtttagtggggcagccaggtgtacaggcacgggaggccacgtagcatgcagctgggctttgtggtgggggctgttgggtcagcagccacgagggtgaggggccctggggacgaggacagggccaggctttgtgctcaccagccacctgctgtcaggtgttcacactgcccaaggtgagcgcgaagaccaagttcaagctgacggcccatgagggctgtcgtgtgcgcaaggtggcactggccacgtttgccagtgtggcctgcgaggactatgctgagacctgcctggcctgcctcaccaacctgggtgacgtccacgtcttctcggtgcctggcctgcggccccaggtgcactattcctgcatccggaaggaggacatcagcggcatcgcttcgtgcgtctttacgcgccatggccagggtgaggcggggcagaggccgaggaggccttcctcaggcgagcgaactgagtgggaccagtactgcttgggagcaggaagggcactccaggtgggcacaggcccaggccacggaggagctgtggttggtggtatcttctaactgcactcctcattcttctgcccacccaggcttttacctgatatccccatcagaatttgaacgcttctccctaagtgcccggaacatcacagagccgctctgctctctggacattaactggccccgcgatgccacccaggccaggtgtgtggaggggcagctcctagcctgggggacctgtgcccagggccaggtctcatcccacccccgagatctgccttccctgggctcaggagtgggagggcaaggatctagcgtgccagcctcaagtcatccacctatggtccccatcatggccccatctctgcagttacaggatccgagagtcacccaagctgagccaggctaacgggaccccaagcatcctgctggccccacagagccttgatggaagccctgatccagcccacagcatgggacctggtgaggggggcatgaaaggggtccagaccctggccccacggtgccctgggggagggagtcgggactcacatagctcagggatcgggcaggcttctgtaggagatgggtggttgtgtgctcactggtgccacccctcaccatgggctgccttatgggtctgtgtccctaggcccccaggtgcagagggtgctaagggtcctggtaggggctgatgacttgctccctgtagacaccccggagccacccgaggctgcactctcacccatgtccatcgactcagccaccagtgctgacaccacgctggacacgacaggggacgtcacagtggaagatgtgaaggatttcctggggtgaggctggtgggcaggtccacagggggggctgccctgtcccctaggcctccgtccccagggctgccaggggctcccccgcccccacccctgagcaccatccccatctcgcagctcctctgaggagtcagagaagaacctgaggaacctggcagaagacgaggcccacgcctgtgccatcctgatcaaatgaggtgctgcaggggtggggccctggtcctcaccactggtgacgtccacccccttcagcccgtctgggtaccatttggccctggtcttctacctgagaccctggcaggcccatgtgatggcactctctgaaacctggctgccttccatggagtgcctcaattggggacttctggtgctcacacagacaccagtgtcatggttgggtattagaaaagcagggccagcccctcagcccttgcatgtgacaggtggtggttaggacaagaccagatttgttttgttttgttttgttttgttttgtttttgagacggagtcttgctctgtcgcccaggctggagtgcagtggcgtgatcttggctcactgcaacctctgcctcctgggttcatgccattctcctgcctcagcctcctgagcagctgggactacaggcgcccgccaccacacccagctaattttttgtgtttttagtagagacggggtttcactgtgttagccaggatggtctcgatctcctgacctcatgatccacccgcctcggcctccctaagtcctgggattacaggcgtgagccaccgcacccggccaacaagaccagattaaaccacttagaggtggcagtagtttggggcttgggagctggtttggccagcctgtttcatagatgagatcactgaggtgcacgaggtcaggtctcatcggttgggcccagcaagtggctgacttacccctgcctgagtctgtggatcctcacctagatgtggggcccatagatctgcccagcgcatttgctgcctcatgttcccaggcacctgactgtaggccatagcctcaccctgcacaggacatggacacctcccagctctttgtctggtgcctctccctggcctcagtggggcatatgtggcctggcgcttggatacccatctggagactcagcaagcccatctcaggtggtcactgaagggccatgcctgccctgcagaggagacagtggcagcacctgtgtggtctggccgctgtggcaatccatctgcccttttgccctccctcaccttctgctgatacctcttctctccctcttccaggaaggccagaactatcccgacctccacctgccctgctcggagctggagtgctggatccctggcacctgcctggccccttaacatagaaccacgcctgctaacctgtaggctccactgggacctgctgtcctgtcccgcctgaccctgggccctggagcagcaccagccccagggtgtgggcctgggacctgggccagaactgagccctcctgcaggcatttggctgccctgggggcccactgcctagggaagaggacaggtggggcccagcacctgtgccacctccccccctccacacaccatccttccccctcactttgcagagtatttttccttttttttttttttcttaaagacggagtcttgctctgtcgcccaggctggagtgcagtggccccatctctgctcactgcaagccccgccttctgggttcccgccattcttctgcctcagcctcccaagtagctgggactacaggcgcccaccaccacgcccagctaattttttctgtatttttagtagagatggggtttcaccatgttagccaggatggtctcgatctcctgacctcgtgatccacccacctcagcctcccaaagtgctgggattacaggcgtgagccaccatgcccagccctgcaaagagtatttttctagcgcctgggctggacagttgtttctaaaactaaactattttggtacctgcttctgggccagtccccagcctgtcatgagtgtgtgtgtgcgggcatggatgtgactgggagctctgctgggcacccacatctggggcctagtcaggtgtgtgtgtccggcggggggggggggcaggggggggggtcaagatgagtttccctgtagattgtaccttggggtttttttctgtcgttttgttaaaattagcgccattttaatattaaaaatactgatttttaatattgaaaataaaagcatttaatatctcttaaagggcatccacatctgctttatccctagcggaagagtgagggggcttcacacgtgcactcacactgtggagagagttggatttcccagacccctgagggcacctgtcagggtcatccccattggtgctgcttgaggctactggggactgtggcactggacgtggctggagcaggtggtgtcacctgagtacattctttgctagcagacagtggatgaggccccttcctcttcctcaccaagcctggggctgtgccagcctgtcttaggccagggccttgcagaaggcgctccaggcgtggaagcagcgggtaaaggcgtgctgctcattgcccttgcggaccaggcgcagccggcgcggccgctcatgttccttggaccgcatgtgctggatatatacctggcaaggggacagcgagccttgggtgatgaccctgccctgcccacaggcccacctcggccctccctccacccagattacctggcaggccttcaggctcagcttgatctccacctggctagtctgggtccccacccacatgtagacctgtgggggcagcaggggagatacggttgcatgggtgcctgggaacagccccttgctcctggcccgagaattcccatttgtaagtaagtctatgggcgcctccttggatgggcagggctagtggcaacatcacacctcttggccattgtctagcaacatgatgtcatcatctgccaggtcatcttggcaaaagtcggagcatttctcagtcactgcaaagtagcccttctcgttggagcacctgggaatcaagggtcaaggtgaggccagaggtcataagcagcagtgccaggactgaggggagggtcagggccctggcctcaccggaagagacgtgtgtgtttcatgtactcggcatcgtcatcatagggcttctgtgccccaatgcccacccagaagaagttctcaggctcctcaccttcgttgataacctgcgggaaaggccagtccagcccagggcccctgcctgccctggctcctctgtgtgtgcccgcctgcccgcccgcctcctgacctgcttgctgtaggaggtgtcaaacatggtgttcaggatgtcttctgccaacttggcttcgtcagggtctgatgcccggcccacccaggcatacacgatgccctggttgtcctcactctcaaagggaacctggggagtgtgcaggggtgggggtgttcgcagctgactcagcccccaaacaccccaccccttggtccacggagtcctggctcacacccacaaccccaccttgaggatgaagcagaactcggagttgaggaggctggagtcggtgttgatctggatgcacctgtggaagggatggggcatcagcaaggattcaggcctggctccctgacgcttgctcgccactgcgtcctcccccagccaggcaccgggtgcagagggcgctgccgttggtgcggatctggtagaggctgggctgttgggcgccctggaccgccttcctcttgccccggtggatgatgaacttcctcttgaaatgggacaggaacttggggttctcctgctgctgcgtcatgcgtaccacctggggatgtggaagtgttaggggcagctccctggacccccacctgcccctcgggagcctaaccttcgctgggtctgagccccaccacacccctccgcctggcctcgggctcgcggggctgccaggcacacctccagcttcccagggaagaggctctcgaacttcttttgcaggctgaaggtgaaggtgagccagcccatattggaggcttcacggccctgccagaagtacacgatgcactggaagtcctcctctggctgcttctcctctgcctcagcggttgcttcctcgccttctttgccctcggccttctcctccttgtcttccttcttttcctcctcctcgtactccacaggcacccagtacctgccgggttggaaggttgtgagcaggggctcgagcccccagcaccaggggagggacttggggaagggagtgctgaggtggtacctgcagaggaagacgtagcagtcctgcgtgtagaagtggccaaactcctcttccggcagccgcgcaaacttcttgccctccagcacgaaaccctccatgccgtctaggtcttcgttccactcctccatcagctgctccgcctgcaggtgagagggacccgccccgcggcaggtctgagcgcgctctgcgcataggccccgccctcggcctgccccccacccccccccccgcgccccggtcccggccctgcccccacctcggccagcgacatgggcggctgccgcggcaggaaaagcgcagtgaggtcagccttcatctggtctttcttctcggcgtcgcgtttcaccttcccggagagacccgggctctgcagcacggcctccgcattgcgtgtgtagtccaccgtcaacacatcgtcccaattcttgaacttggccttgaacacctgccagggaggccatcaactaaccatgaggggtgcggcatgattagagttggaggaagtagcccgaggcttgaggcgggacccaagggagatctagggcggggcttgggaggcggggcctcggacacggaggtaggaataggaggggcagcttgcagagggggcggggcctgggcagagtcagcaaagaggaggtgggtttgggcccagctctgtagggaggtagtgaagccacaggggtcagggcatgtcagggtgcgaaggatcctggggaggggcctccgaagctgcaagcgcacctgcgcctcggtgccctcgaggctgcggctgaccgtggcatggcgtggccggtgcagcatcccgcacagctcctgacccagcttgagggcggcagcgcgcaccaggcgcggggacttgcggccgagccagatgaacacgtcggaccaacagtccagaatgtacacgcagcgcgtgtccagcagactctgcagctgcggaccgggagtctggaggtcaaagcccagccaacggggagggatctggccccacgccctcctcctgcatctcttaccagccgcattcttggcatcagctccaccttgggacgctgcttatgttccacggagagcttgtagttgatctgtggcagctccaggtagcccaagcccaggcccacctggcaggaaggatgagcatggcagggaagggatctggagacaggaacctcacccacacagccctctgctctggaaccagccctgccctgcagcgtggctcactgactgcttctgtttccccctccccttcaaggtctttttagggatatcctttcagaagggcttttaaatggagttttccctgcctgccctctccaggcccttcatgccatttctaattaacgtgtccctttcctgttcacaagaatctagataattgagccaaggttcccagccctggcactaggtgcttctgtctcccctacggccccaccatcctggaaagactccgtgaggctacttctcaaaagcagcctccagacctttgctcatactgttccttgtccagaaggtggcaccctctccccaccaaagtcgagatggagcccaaagccaactacatcggtgtgtagtccattcccccagtcggtgggtgaacttgggaggccaaggtgggcctcagcagcagggctcaccttgtacagcttgggctgcggcggccagaagtcttcaggcacgtgcttcttgatctcagagggctccccacccagtgcctcccagaactctgggagctcctggccctgcaccagcagtgtgatctcagccttccctttccgctcattcttgttaattttctctgcaaagagcctgagagcaggatgcaaagtcatcagcgaggctcacacccctttccttcacacaaaagaccccacggtgtccttgtacctggccttggtggtgctgctcagtgtggcctgggccccccgccatacgtagatgtctagccctcggtccagcaggaaaacaaacctggacaagaaggggcaggaaggagctgtgatggtgcatggggcaatggtcaccccatgctcctgaccccaccaaaaaaaatccctcactatggggtttctgggtaagccccagggaccccccgccaagctcgtgggcaggaattgctagagggcctcctcttctaagaggcccacacctgcccccactggtggggaggaggctgaggatgaagcacccccacctcacattgttggggctcaccttgggtccagagaggtccccttgaggggcacaggctccaacttgatgttctttttcccatacacacgatacatcctgggcgcagggcaagagtggctcagtgtaggcaccaagggcctaacttagccccaacaccctcccctccaccccttgccagcagactccaggtccataccccccactgcccacacaccctcacctggtgacatagtgtgtgtcttccacagtgtagaagccactggctgttccaccctcaatgtaggagatgtcgttgtcaaacacctgtgtgtgtgagggtgtggttcttcatcactgagctgccccctcccccaccaaccactgcccctcaggtgggggtacagagttgcatacaggtgaattgagtgctacaaatctatgatgcctgtaatcccagcacttcaggagtctgaggtgggtggatcacctgaggtcaggagttggagaccagcctgaccaacatggagaaaccctgtctctactaaaaatacataaattagccaggcgtggtggtgcatgcctgtaatcccagctactcgggaggctgaggcaggagaattgtttgaacctgggaggcggaggttgcagtgagctgagattgtgccattgtactccagcctgggcaacaacagcaaaactctgtcttaaaacaaacaaacaaacaaacaaacaacaacaaaaaaaacagatctggctgggcacggtggctcatgcctgtaatcttagtactttgggaggccaaggcgggtggatcacctaaggtcaggagttcgagaccagcctggccaacatggcaaaaccccatcactactaaaaaaatacaaaaattagctaggcgtggtagcacatgcctgtaatcccagctacttgggaggctgaggcaggagaatcgcttgaaccctgggggcggaggttgcagtgagccaagattgtgccactgcactccagcctgggcaacaaagcgagagtctgtctaaaataaaacatacacatctgtgtctataaacatacacacgtcggggtgttgggatgtatgaaaaatatggacacgttcacccacgtttgtaaagatgccagcagcatgtttagatgcacgcatatcagggtacacaagcaagtgggttcatggaagagtggaaacctgggtgaatgtgggtaaaaaaaactcggggcgggtggggtgtgtgcataaactccacgtgtgtgtacatgcgaacatatgtctaggtgtaaccagctggcggctaacactgctcagtaatttattcaagactggactctggtcccgcccttggccccacctccttggcatccaggtgtgtccttgcctcctaataacaggttttggccctgccttctcactgctcttggcaacaccccttccaccctactctcagctcccctgtgtcagcccactggtctagctcccatgcccagcctgtacccttatccttgcccggctgaattctgccccgcgttccagaactctcctttgctgacccaggctttggccaccttagacctcaccctgcggtctgccttaggtcccgcacagtatcgttgatccaccccctttaaccccagctccctgcctgcccacctgttctgcctacctgccttgggcccactgcccctgcaccagagttccctgggaaccccactctgcccacccccaattttaacgggctggcacctgcaggaactcctcgctctcatcgcccatctcctcccggacagtgcggcactcagcacccaggtagttgcgcaagttgacagcgtggatggcagagcaagctttcttgtcgagtgtggcctccccgccaatccagtagtagatctcccagttgagggagccgctgtcatccagaaaggtctggaagccaaggcaccggccacatcagctttcatcctggtcttccggccaccccggagacgccactctgaacagcacaggcttcccagccccaggggctttgtactgcccctgtgcctggaccacctcctgcagcctgcccacctcccacctggcctccctgaacaaaactctggagttggggactgagccatcttagaggaaggtactgggccacatggcccctaacagcatgcccagccctcaccttgagcacaatgtagcagtcagcctcgtagaacttgccgtggaaggcttcctccaccagcacaggcacgaagttctctatctgccagatggtcagtccgggcagctggcccacgtcctccgtgaagaactcggagtagtcaaggcggggcttctccaggccctggtcccaacgccgcaccttcccgctgggggcccgggcatctgcgctctcctgggggcagagtcacagagcacggcttgactctgtgaagccactcaggccagtctttacttgctacccacacctcagggcctttgcacagctgttctttctgcccagcaccccccgtccctcttggccagggtcaaggccagggtcggccttcagcagaagctaaggctccctgccttgtcccaaccctggcctggctcacctcctgctttttgttcttctcctgggcaacatctgacatgcccttcagcacctgcttggcctggtcatcctgggctgaatccttgcgcctccgcagtcgcatcttgcgagccatagggtccttgggcccactccctgcttaggggaggggcaaacagctgagccctcactgggcctgctgcccccttgggcatgcgaccaaccaggggccaactccacccaccagggtccagaaagctgtatgccacccaatttacagatgtgtcatttgaggcctggagaggagcccccgttcccaggccagacctttccccactcaccagctgcagctgcagccacggtagcaggagaggcacccgctagccgcagctggttctgcagcgagaagtcgatgttgtaccactcagcggcacggtctgcgggcttgggcggcatgaccaggttggggttctcccgcacatccaggacctgccccatagggtgagcagagccggcactgagcctgggtcctacctcccagacacaccaatccagtttcttgctcttgtctgcagccgccagggctgagaggtcagggaactgggttctcctcccacccacctctggggctggctgggggcttaaatgagactgtggaatgtactctggatgcagggaggtggggcccaccttctccccacgggcaccctggcactggccacctccctcaggaggcctctgctgggtcccccttgctccagggcacaccccttgcttgtctctcttgagccctctcaaacccagcatgcctgacctcgatctccgtcaggaaatggatggcttctgggagggtcaccaggtggttcttgttcaggacaagtttcctcagctttgggcacctgtgaagacagggccagccagggcctcaggcaggtgacagacaaggggaagtgggcaagaaaacccctagtcctggggaggggaggcaggtagggtcagaggaactggcgggggtctccattctctgcctgaaggacttctcagagccaagagaccatgttacgggcactgtgatctccagaaggggagagaagcaacactgcgttcccacgtcatgtggccttgtccctaacagtgccccccgaagggtgctctcaggggctcaagttgggaatggctggcatgggactgtggtcttcatccacaaaggtgagttaactgggccgggcgtggtggctcacacctgtaatcccagcactttgggaggctgatcatttgaggacaggcattcaagaccagcctggccaacatggtgagaccccatctctactaaaaatacaaaaagagccgggcgtggtagcgcacgcctataatcccagctactcaggaggctgaggcaggagattcgcttgaacctgggagacagaggctgcagtcagccgagattgcaccactacattccagcccaggcgacagagcgagactctgtctcaaaaacaaaaaagaaaagaaaagaaaagaaaaggtgaattaacccatcttcattttgtctgacttgcacagaccacaaggtgggctctgactacgatcccggggttctctgtgctgcaagtgcctctgctagccccagccctgcccagcacctgcagagactttcagggaccagctccaggttgttgttggcagccatgaactcttccaggttggtgagcttgccaatgcctgagggcagcccgtcaaagtccagcttgttggaattcaggtacagcttcttcagcttgctcagcttgcaaatggctgactggagggggaacgggcaggggtgggaggtcagggccaggctcacggccttcctcccatccccctactgagggcctcagacgcacgggcagtgaggtgagctgatttcgggacaggttcagagtttccacgtgcacccactggtctatgcacagggacagctccgtgatctggttgctgctgaggttgaggcggcgcaggctggggagggtgtacagacactcgggcacccgtgtcaggtcattgcaggacagatccacgtctggggtgcagggtggggtgcatcagctggggcccatacaccaggtgccagggcagccagccctagtgtgaaccccagctctgccacctctgagctgtgtggcttaggcaagtgacaactgctgtgcgcccaagtttctccatttggacaaactccctcacatgggggttgcgggggagttttctaggcataaagtcagtgttaaggcatcatcataatcgcaaaagtcactgtaacataactccagccttttccctctgggtattggtccgaagagcagggttcaaccccttccacccaaggaagcaagagggcccagagggggcccgagctcagaggggctcctggggctgcctgacctgcgaggttgctcagaccctccaggctggtgggcaggttgctctgggtgcgctgggtgctccgcaggtgcagggtctgcagggccgtcatcgctgggagctgcctgccagggtgacgtgagtggtcagggccagggcccacctagggagtgttaagggtggggcttggcagggcaggaccaaaagcacagggcccagagggtaggtgtgaggtcacatctggttgaagggacaagcccaagggtggttgcggggtgtgtaagcgggaagacaggactgagaggtggacatgatacttaggaggttgtacactgaggggtgctgcctgcacggagggatggctgggcctaagggagaagggttagggccctgggaagtgaaggggcccggccagactcctcagggtggcttctgcaggagtgcggtccgagggggcgcccaccggagctgtgcatgcagcagggggtttccattgagcacgagcgtctgcaggtgcaccaggcggcgcatctgcgggggcaggctctccaggcggttctcgctgaggtccaggtatagtaggtcagtgaggttgatgaagagctggttggggatggtgtcgatgctacgggtggggagcaggagccacctgagtcagcaccagccaccccacagggcccacctgccccctgccccccactggcctggcacctgttgtggctgaggttcagcaccagcatgttcttggcgttctccagctcccgcgggcactctgtcagctggttgtggctcaagtcctgggtagaaggggcaagacccaggtcaggggagtctcctccccaccaggcgtctgccaagcttggggatcaggcagggcactgagttgggtgtgggggtagatgagggggcttcagggccaaagggagacagccagggacttgggaggaagagtgcctgtgttagggatctgactccaaaagtgacctcaggcaaggtattatccactccaagactcagttttcccatctgcaaaatgggataacaatggccccagggacttttatagtgagtggggattgaatggtccggctagcacaggggccaggtgagtgggtagccactgaccaggactgagagatcatctagcttgaagatgtcatcggggactccggaattcttcagactgttggctcgggccacgatggcctgggaataaaccataagagtctataattcctggcttccactctcaggaaggaacagagtctagagagggacacctcctcaggcagctcaccagaggccaggcctgaggactctctcacctctggcctttgatcaaatagctccctctcctggagcgctcttcctagcctcccagtgagctcctattcatgcctcaaagcccagctcaaatgtgccccggagccccagcacagggccctcagggaaccttttctgttcaaaccatttctcttcttcttaattccagaaggtgagataggggtaaggtctgagtcagggttttcagaacagagggagagaagtggaccacagagaaatcagaatctggatggagaggaagtctgctttctctccctaacttaagactgacacctcctcataccttacagacatgcagaaagcttgagcatgagggaacagggccagagaatggtgtcgtgactccaagtgacaacgggagtcaccggagctgccccgccacttctccagtctgaatgcctgtgcggcaccctgctgctgcttcacggggtcactgctgcccctcccaaccactgcacttgcagaggaggcccagaaggtagaagcgatttgtacaaagtcacatcaccaggaagtggcaaagcccagctttgaactcagagagtccaagtcagaagctgtgccctaaacatctccagggctctgacttcagatgggatggccctcgttgaggcctacagggtctggccaagggcctgatgttctgggacgttcaagtcttgggtagaaggtacacggtgctcccggccaaaccccactcaacaccagctctaccactgcctggctctgtgacctggggcaagtaatctgccttggtggccaagtttctcttctgcaacattagtggagggctagagcatatgaaaaaatcctaacagaatagtgggaacattgctcagccagtcttggctattattactgtagttattgtccataacggctggtaagattttggatttctttacctttttcctgatggaattctctgatccacatgggttactttacacagggcactgctgtaacctctaatgagagggcccctctgtgacacctgagcctctgagcctgacacggaggtgggcagaaatgctggcccagcttggtgtctagcccaggcttcacgtccctgaccggaccttggccccaaccccaagctcggtggcctcccggccagcactcacgcgcagcgatggcaggctggacagctccccatgaagcgtggtcaggttgttgtggctcacagacaagtgttcctgggccggaatggggagcacaggctcagcagggtgggtggggtgtccagagtccctgcctgcctccacaactctgcaccatccaggaaggcctcagccacactggcccaactacccctgcagcttccctccctcactcacccggcctcttcttgcacacctccctggacagggtgcccactccctttcttccagctctgctcatagctgtcggtgttcctctctctggagaagttgtctgccttctccacaggctctgcccacctggctcatccacagggaccctcccctgcccgcccaaacccccttaccagcttctgcagggcggccagctcctcgggcaggtagcagaggccagtgcggttcagcttcagccaccgcaggctggtcatggccttgacattctcagggaagtagccgccctgggggaaggatgtcaaggtgaagcacagagcccctgctcaccaccttctatggctcctccagcccatgggagcctttggggagccacagaaccaactctcaccatctgtgagaacacagacaagtcatttcatcattgtgcctcaatttcttcacccatagaatgggaattttaagcccccccgtgacaaaagtgttggcctaagatttgtctctcctactggattctgggccccaggagggccaggacaaaactggcttgtttcaggtgaaagcccagcatccggctctgtggttagctcggctcaaattccttcacctagcattccacactctgactggctgcctggggtgggggatcccccttccaagcctttgcaaaggcgccacctgtgccctcatcctgccatcagcacactggcaactcacggccagggtcaaacccttgcttgcggagaccgtggctccccaccctgcagggcaggccagcatcactgcactcccctggtgtgtgaacgcccacctcggcacctccagcccttgtggcaccaagtctggggcagtaggtgccttcagtgcctgcggctgatattcctttccccctagcgccacattcccagctggtgactcggactctcccagttcagcaaagaggaacggggaccccaggttagggtggtggggatggggtcagggaaaagtggtgtagccacttgtacttggggtcaaaggtgtgtacacaggcaggtaaacgcaggaaaaacctgcctcctcggccccagccccagaccaacaacccaggccgaccctgccagtcacccaccctgaaggtgaggctgaccctccagccagctctccctccctctctttctctgcttcccctttggtcaggcaatgcctgtctcattcttgagtcctggaaccaccccgccgccccacccactggctgcggagggctgggctccggtcccttttctctcagtccagcagctgctcagacaactgccacccagcacctggcacaccggcctgacacactctccacaccaacaaatctcactatactccttgcgtccaaggaggagacttttaagccccttcaccggctgagaaagcctaggctctgagaggggaagtgatctgagaggcccaggatcacacagtatggcgggtggcggtggcggggagagggcagtgatgagtcggctccacacccgcccctgggcagccgggcagccatccctgagtcagggcctggcttgggcgtgtgacctcagaggggcggggaggctcgcccgatccccaggccaccatccagcctagaccgagaacacggacgcggggtgggggctcccggccgggcccccggcgggactccgagcccaagcgtccgtccccggcctgcccagcctcggtctccccgtacaggcactgggcggaggcctcggaggtccattcctggccaggggagagccccaccccgccccggccgcagtccctgggacacgcagggcctggagccgagcgggacaggaagcggaggccaagcgggccgggcggaagagaaggcctgcagggaggcccggcacgcgcccggcccggctcaccttgaagtcgttgccgctgaggtccacgccacgcacgaacggcagcaccccggtggcctccatggcgccgctctcgctgccgggccgcgccgggctagggagcgccggggcgagggcgctggggggagccgcgggctgggccagcgccggccccgcccctttaacccgcccgcgcccgccgcattccgcggggaagtgtaggctttaggcctcttagggcctcagtttccccgtctgttcgaagactgcggaggcaccaaggagtgcgggccccccctgtgctggagttggaggcttccacgatctccaggcttaagtcccagcgccccagggcaggggccgtaacggccgctggtcgaggcaccgtcacctgcgctgctgcagcacatgaagctggccctgacctcagagagattctaaacctcggccccggggcgcagaggcccaggaagtgcctgtacttggctgaccggtggtagtgagacacctggatcctcgggtcctagctctcctgcttctggacttagtttcctcatgtgttgtttttgttttgttgagacagggtcttcttgctctgctgcccaggctggagtgcagtggtgtgatcatagctcactgcagcctcgaactcctgggctcagcctcccgactacctgggattataggcgcaggccaccacacctggctaaatttatttattttatttattttttattttttttgagacagagtctcgctctgtcgcccaggctggagtgcagtggcgcagtctcggctcactgcaacctccgcctcccgggttcacgccattctcctgcctcagcctcccgggtagctgggactacaggcacccgccactacgcccggctaattttttttttttttttttttgtatttttagtagagacggggtttcaccgtgttagccaggatggtctcgatcttctgacctcgtgatccaaccgcctcggcctcccaaagtgctgggattacaggcgtgagccaccgcgcccggccttatttatactttttgtagacacggggtgcttgctatgttgcccaggctggtcttgatctcctggcctcaagtgatcctctggtatcagcttctcagagtgttgggatgacaggcgtgagccaccgcgccctacccagtttcctcatttgtaaaatactttctaaggttgtcaccatgagcaaattaacaaagaatgcacgtgtagctcgcagcatacagcaggcgctcagtgagtggcaggttattattccgttttgttttgttttgtgcgccaggttattattcccacttagtgtcagcacccctgtgctcgtacccccctacaaagggaggctccagaagagaagcatccgtcttggtccttgctgttcaagggggctcgccctggctgacacatagcaggaccccaataaatgagccacagctgttatatgcccaaccatccttcgcaggggaggagggggtctagtgtccccattttacaggagaaaaactgatgcccaggtggagaatggcccacacaagctcgcacagagcaggtggcaggggtaggcgctgtgcccctcaggcccacaggtaagaatgaggccaccaagacactctctcgcagaggtgacctaagaggttggatgtgccgggcctctagccatgtgcagcctctctacctggtccccagaaggaacggggcccagacagcttcctccacaccggaggctcacattacaacgcacagacgtcctggagggtcgcctgtcacgtcacctgttcgcggtctcggaatgcagccctgcacctttaaatccagactgcgtcagggagtcccgccccagagggagtgcggctgtcggctggggggcgggacctgcccttcattggctgaaccgcgcagtattttggcacctgtgcgctggactcgagcgctccgattggagttagggcctgcttgtctgcgtgctgcgaagtccgcggctgcccccggggccctagtcgttgggttccagggtccttcacgttccattcccaggctggtctgagctccggggccgtggtcccgctgcctcctccggtcgtcgtgcggaagctgcgacgcaggtacagctggagcgcggcggggcggcccccagggtcaccgggctcggggcttggcgcgcgacggaacgcagatcgggggcgtggcccgcgatcaccgctggggaaggcggggaggggacctttgggggaccaagggcagcgttcgaatcctagcccagcccccttcccctctcggtctcttggtttatcctgcgaacggggcgtcacccgcccacctagggctgctgcgcggcctgctccgcccgggcccagggcaggcaggtttggcggaggagggaaggccaaacggcctccagggccccgctgcgcaaacttgggttattttcagccacccgtgccctttcctgcttctcggagctggaaggctgtggactgaggcctgcgcgaccccgccagagatggggctgagtcccaatttagacaggttgggagtatttaaagcgctttacagtttgcaaagtagattcctggtctctctgggggcgggtggcagtattgatccccgagtcaccgatgaggagattgaaaccggccctggggccgtggcgggtcacccggttggcctgggatcgccccagagaccgtcttatttttagtctggggcgaatgggcgggtgtacggggctgagtcacacagcgcttcaggcttcagctactccaggcatctggtcacctggcaactgggcccctggcacccacactctggcagggcaggtagaagtccttggtgcccgggcaggctgtgacctcatggtcatctgctcaggcctccccgggagagttctgcttggtgtctaactgatgtcctaaggtcccagcccttctcagctcccagggcctgagggcagtgtccccctcgcagaacgtgaggaatgtggactgggccctaggagatctttgcctccacttcccaagtgctggcccccacccagccacacacttcaaggctgcccacatctgcccctcactgctgcctatgccatcttacaggtgagcaaacaggctggggcccaggccttcaccttactttctgtgttgcttggccttccggcagttgagaagcatcacccaccactacctacacattgtcccaagactgagaggcccagagagccccctgtacagaggcactgggcagccctttctgccctgccaaaggggcttcaaccctgacaagcacatctgcattggcctgcctgggcagcttgggccgtcttactctgcccgtgctctgacttggtagctctgcctcttgggctaccctgtcaagatttgggggtaactggtcccagtggtcccccagactggctggggccccaaattgttggtcttctctggactttgggctcttctgaagaggttatcatagagggctgctgtgccctctgggtaggaaccttcagatgaggctgctgctgaggacctgggcacctggcacagggagaatccgtcagactctgtgggcggatgagagtctggaggccttgcagtcatgggttggagaccttaccactcacttgtgagctggcagcctgtagctctgtaacataggggtagtgatgatgacaccctggtgatgtcagaggtcctggagggtgggctccagggagagaggccccttcctatacctgcacaagcctcagggcctttgtgagcttctttccaggcagctttgggagaaggggcttggcagctccctcatctcctcatgagagatgggggcttgggaccccaaaacccaagctcatatcccatccctgccctttctcaggtactttacgtgatttcccagggcctcggtgtcctcccctgtggatgggtggcccctttctctgagaaattctcagaaagcccccctcatgggctcagctctgttacccagcataaggacagctagagcacctgtccacagcagcccctctcccagcctggccacctgcacctgagctgccccttcacccctggctctcttacaggcagaccatggcagagttctcccagaaacgggggaagcggcgtagcgacgaagggctgggcagcatggtggacttcctcctggccaatgcccgcctggtgctgggcgtgggcggggctgctgtgctgggcattgccaccctggccgtgaagcgggtaaggccaagtgggcgggtcatgcctgaagctcctagaggaggacaacagggttgggcttttcagaggggccctggggaggggtggggactgcccaaggccttcatgggagcccagggcacctgcttctccacccagcacgctggtctgctttgccctgggctttgctatgactgcccagatttcatatacactgatctgtgtgactgtgcttgcagttcattgacagggccactagcccgcgggatgaggatgacaccaaggcagacagctggaaggaactgagcctgctcaaggccacaccacacctgcagccccggcctccacctgctgcccttagccagccagtgttgcccttggccccctcgtcgtctgccccaggtgagtggcactccttcccctcttttggtgtcacattcaagagacgcagcccaggctttgccctgactgactgtgtgaccctgcgcgagtccctgcttctctctcggttgtgggctcctcagatatttaatgggggtggtgtttctttgccctgttcctggagcaaggtggtagcgttgtgatggtggggagctttagatggggaaactgaggtccagaggggcgtgacatacctacctactctgcatgaagctgttgtcgccagggtgttggactctggggcaatgagaactcgtcaccaagagctcactatatgtgaggatctgaactgagtgccttctcaggtgccactgcaggtgagaaaagtgaggccctgggacatcacacagctagttctcggtggcgttttcttaactaatcacaggctgttccgacatgttccccgccccttcactctgcagaagggcctgcagaaactgatcctgaggtgacaccacagctcagctccccagcaccgctgtgtctgacactgcaggagaggctgctggccttcgagcgggaccgtgtgaccatcccagcagcccaggtggctttggccaaacagctggctggcgacatcgccctggagctgcaggcctactttcggagcaagttcccggaactgccctttggggcattcgtgcctggggggccgctctacgacgggctgcaggcgggggctgcggaccatgtgcgtctcctggtgccactggtgctggagccgggcctgtggagcctggtgccgggcgtggacactgtggcgagggaccctcgctgctgggccgtgcgcaggacgcagcttgagttctgcccccgtgggagcagcccctgggaccgcttcctggtcgggggctacctctcctcccgcgtcctgctggagctactccgcaaggcgctggctgcttctgtcaactggccggccattggcagccttctcgggtgcctgatccggcccagcatggcctcggaggagctgctgctcgaggtgcagcacgaacgcctggagctcactgtggctgtgcttgtggcagtccctggggtcgatgctgacgaccgcctcctcttggcctggcccctggaggggctggcggggaacctctggctgcaggacctgtatccagtggaggctgctaggctgcgagccctggacgaccatgacgctgggactcgccggcggctgctgctgctgctgtgtgctgtctgccgtggttgctcggctctggggcagctaggccggggtcacctgacccaggtggtcctgcgtctgggggaggacaacgtggattggacggaggaggccttgggtgagcgcttcctgcaagccctggagctgctcatcggcagcctggagcaggccagcctgccctgccacttcaaccccagcgtgaacctcttcagcagcttgcgtgaggaggagattgacgacattggctatgcgctatacagtggcctacaggagcccgaggggctgctctaggtgggtggaaacgggtggttgccatgttttctaatgctggggagctgcacccacctcccttccagggatttgaatagtggtttttctctagctttttgccagaacaaaggagggtacattacttaaacccagggcatcaggatgtgcttgggctatggtggccataaaccctgagcccagagagcttgggtcactgtcacctgagtgcagctgggctgcctcaggcagcttggagtgccagccattcctgcaagcaccgtttcagctcttggggccaaccccaggacctttggctctgtccatcaccagcaaccaatccaccaacagaatgtggtttctgccatcctgggcagaagctgaaggccagcttcacatttctgctgagagaaggtgacttaacgccttttccggccctagctccaggcgttttgaggcgtctggtgcctgatggtaggtatggtgtgtttgttctgtcccccaggggctggagtcacctggtgcccctgaaggacagatttttggctgttaaaggatggcattttcctgctgtcttctgtgcgtttagttttcttgctgagcgggagctcagtatgacttgccacccacctgatacctcagggcaaggccctttttccctccagccaggtgagtgttttcttcaggcagctgagggtcctgggggagctgaggctctgtgctgcacccccagcccacagctggggcatctcactggagctgttccaggccccactggagagcagaggacctgatcccccactagagaggtccggtgtgcacagccggcctcccagtgtgccaaaatgaactgctctcagctgatggctgtattctgactttgaagcctgttaagaggtagcaagggggctagaggagggagattccacctcccctcccaagtgaccctcctcctgcctctggtatccttccttttgaaacgaagctcagcttcgaagatgtgaacaagaataaaaggaaaaaattctaatgtatatataactcaggctggataagggagtcttggtgctttcatacgcagctgttgagggttttctgtaagtcctgtggcttgtcctggcactttggcaagagtgcttgaggtcaattggaggtggtagagtttactttaaaaagtagcatcttggccgggtgtggtggctcgcatctgtaatcccagcacatcgggaggccgaggcgggcggatcacgaggtcaagagatcgagaccatcctgaccaacatgatgaaaccccaactctactaaaaagacaaaaattagctgggcgtggtggcacgcacctatagtcccagctactcgggaggccgaggcaggagaattgcttgaacccgggaggtagaggttgcaatgagctgaaattgcaccactgcactccagactggcgacagagcaagactctgtctcaaaaaaataaataaataagcatcttggccccgcgctgtggctcacgcctataatcccagcactttgggaagccgaggccggtagatcacctgaggttgggaattcaagaccaggctgaccaacgtggagaaactccatctctggtaaaaattcaaaaaaattagctgggcatggtggcacatgcctgtaatcccagctacttgggaggctgaggcaggagaattgcttgaacccgggaggcggaggttgtggtgagctgagatcgtgccagtgcactccagcctaggcaacaagagtgaaactctgtctcaaaataaaataaaataaaataataatagtaataataaattagcatctcagtctgtttgggctgtgataacaaaatgccatagactaggtggcttataaacatcagaaatttatgtcttaccattttggaggctagaaatccaagagtgagtcacagattccatgtttggttgagagcccacatcctggttcataggtgtccccatctagctgtcctcatgtggaggaaggggggaaatgctctcctagggtctcttataaggaaactaagcccacccatggggtgggggcccacattcatgatcgaatcacttcccaaagaccccatctcctgttagcagtgccttgggggttaggatttcagcatacaagttgaaggggacacagactttctgtccgtgacaagtaaggtaagtggaaggaaaagatgaaaagcttggtgttgctttagtaatgggaaccagccagtttgggatgtttcttcccgcaaggctgaactgctgagccctgcaccatactttctgtaattagtgggctgttgacagcccttcagccatgctcatcattttttagaaacctgtgttttttttcttttgagagtgagtatcactctgtcgcccaggctggagtgcagtggtgcgatctcggctcactgcaacctctgcctcccgggttaaagcaattcttctgcctcagcctcccgagtagctgggactacaagtgcgcgctaccacgctcggctaatttttgtatttttagtagagatggattttcaccatgttggccaggatggtcttgatctcttgaccttgtgatctgcctgccttggcctcccaaagtgctgggattacaggcatgggccaccgcacccggccagaaatgtgtgttctctacctcccttgcacctctttgtggctgcacaagtggggaggaaacttgccccgccttgtgcaggtgagaggccagggcatcttaaccctctcacccgcaagagccaaagccagggctcacttcctatcaccagatgacacatgtgggctggggagggctctggtctgcgtgcagggctgcttccagcctagctgtgccactcgcaccctgctggtccttccccgacttacgtcctgaggggactcccctaccccttccagctgtgactgcaggacccaagggaagcaggactgtgccaagcaaatggaatagtggtgtaggcctctaggtgttgggtgtagggcaagaggcgggcacgagggctccttgtagaggatattataagggtccaaggtgggagacacttggctgaggtccattccaatcacttggctgaggtccattccaatcacttgatgccttgatgctggagagctttgagcagtttccttggcggtgttggggcagcaagggaacagtctggggcagagcctgtgcctcagtcttctcatctcttaactggggagggtcatgtaatacccaaccccaggtgcttgtgacgattaactggggtgggcagtgcttaacataatgcctgggaacgaggactggtgggcctagctgtgccccaccctccagccacatccaagccccagcacagcaaggtgctcccagatgccactccagcccctggtcagagcgcagctgtccaggaagcaagctcagtctagagtgccactccttcgacgaccagaccccaacacaagcctgatgtagaagccacttgcttcaggtagctctaaatgtactgtctcataccatggcttaaaaaaaaaaaatccaggatgagttaaaagtgttcgtggtttcatcacctagccaaggttaatgtctgggtcttccgtttctagccagagaactggaaacaaatcactgttttgctaggagctttgcatgacctcacgccctaggctgccgggtcctgggctgtcctgatgggctgtgaaatcccacccactcccagggctgccgggtcctgggctgtcctgatgggctgtgaaatcccacccactcccctccccgcgaggcaaggacagcctctgccctgcctgcctgggagcacggtatgggcttgcctaggcctcagtgtcttaacactgtggtgactcaaattccttgttttaccttcaccaagtaacccagagccaggatccttgatgactctggtaaggcagtgactacccctgctcagaatgcaagggtcgctagggaagattttagaaaaaaaaaaaggactccaaaaatggagaatctaaatgtagtcctttgaaaatgtcacccatagatcctctaccactaactgtaataaatttgaccaaatagcatttcctttttgtaaatccacttgtacgcacttctcttcaggaatacttagctgtgggattgtcctcaaagggggaccatttattcccgtagagctgacctgttcagctcgtttccgtatctgctaatatttaaaaaagcaaacaaaaaaacaggccaggtacagtggcttatgcttgtaatcccagcgttttggaggttgaagcgggaggactgcctgaggccaggggttcgagaccagcaggggcaacatagacctcatctctacaaaaaataattagccaggtgtggtatatacctatgggcccagctattcaggaggctgaggtgggaggatggcttgagtctagcagggcgaggctgcagtgagccatgattacccctgggattacaagctggtctcaaactcctggcttcaagcagtcctcccagctcggccaccctaagtactgggattataggcgtgagccactgtgtgtagccaacatttgctttttttttttttttgaaacggagtcttgctctgtcactcagactggagtacagtggcccaatctctgttcactataatctccacctccctggttcaagcaattctcctgcctctcagcctcttgggtagccgggtttgcaggcatgcaccaccacactcggctgatttttgcatttttagtagagacggtttcgccatgttgcctgggctggtctcgaactcctgacctcaaatgatctgcctgcctcagcctcccgaagtgttgggattacaggtgtcagccacttgtgcccggccaacatttgcgtttttaatgacacttttcttttgtaatcaggatatatatataatcttaattccttgagaaagctaaggttgtagtggagaaaacccaggtgtgttccaaagacaaacaccggtgactctggtgacctgcactgggtcatctctgcattgcttgccgaattcctgagacgataagaccaatcagttcagtgggctgcggcctctggcaggcagggaggccactggggctcgcttgcgtgggtttcagaaggaacctttcaggttcagactgcaggccagaccctgactctatattagtgttttccagagggacagaaccaataggctgtatgtaatatatagaaagcgagttaattagggagaagtggctcacaggattacaaggtgaagtcccagaataggccatctacaagctgtggaaagaagccggtagcatagctgagtccaagtccaaaagcctcaaaaccagaaagcccacagtgcagccttcagtctgtggcagaaggctccaggaagctgctggtgcaagtcccagagtccaaatgccgaagaacctggagtctgatgtccaacagcagagaagaggaagcaagcatctggcacggaagagggagagggctggagaagactcagcaaggtgctcatcccccttcttccacctgttgttctggccgtgctggcagctgattggatggtacccacccacattgagggtaggtcttcctttctcagtccaccgagtcatgtcactctcctctggcaacacccttacagacacccagaaaaaataccagccatctcggcatcccttaatctagtgaagttgacacctaacattaaccactgcaccaacaccacctgtgtgtgagctggtggtctaaggtggggatggggtgcacagatctgtccctggtagggacggtcaacaggtgagtggcaacaccctggtgagcatattgagctggggccacctgtgttccagtccaagaaacctggagatccagctgaatgtgaacatcccaggtcttcggccggattctataagaggcaggtggtgaattcatcccaaagggcagtggggtctctgcccagtgtctcaaaagccagtgcctccaggtgcgggccccagcgctgttgggcacattgagcctggctctggggagtgggggagccggatgttggtgacaaggcttatttttaattctggatgctctaagtatccggggtgggatcaggcagagactcctcaactgctacaagttgtgtggggtggtctcgtttcctctgctgttaagtgcaagcaatcacctggggaagcatgtgcaggacgtcagccaggcttctttgccaagatggcagggaagcctccagttaccccatgggctctcagcattggtgtggagagcagggaggggctttttacaaaactctgatggggcttggggggacatggcatcagagattaggtttcaaggccaggttagctgcttggtagaggaaaacacttaacccaacagagctatggttcctgcacaaaaaggacaggagatgctgtcttgctggcagcaggaggttgaaaccactgtaggtgacagcctggccagtgcctagtctcagctagatccatcaaggggggggcggggggggtccattttcttttccttggttttgcattgcacaagctgcagatgtggctcaacacagggactaaaaacccttccagtcaacgttgacggggtaggatgagctgcatgctgctaacctgagtgggccatcgagagagacttagaaattccaacaggtttgatttgtgaagctttaatttgcagtcgtgcctgaccgtaagccttcactagagagcctcaatatgaacaaggacaccccattacggatgaggcaactggggctccaaggatgaggctgcacacccagggtggcagaagaggccaggaagtgggagctgagcctgggtctgtctgatctcagatgcctggcccagtccatggtgcagcccaatcctgcagtttgcttttgagacacacagttgcctgcagagatgtgaaaaccacaaaggcatctgatatccagaaactattaagaactcctacaactcaacaacaaagacagacaacacaatttaaaaatgggggaagagaccaggtgtgatggctcctgcctgttaatcctagcactttgggaggccgaggctggtagatcacctgaggtcacgagtttgagaccagcctggccaacatggtgaaaccccgtctttactaaaaatactaaacaaattagctgggtgtggaggcagatgcctgtaattccagctacttgggaggctgaggcaggagaactgcttgaacccaggaggcagaggttgcagtgagccaagatcgcaccactgcactccagcctgggcacaagagcgaaactccatctcaaaaaaaaataaaaaataaaaaataaaaaatgggtgaagaacttaaatcgacattctccaaagaatgtataccaatggccagtaagcctgtggaaagatggtcaatgtcattaatgactaggaaaatgcaaaacaaaaccacaatgacacgccacttcatacccactaggatgacaaaacactaggatggctataatacaagaaaaggaaaggaacaagtgttcacaaggatatggagaagcagtaaccctggtgtgctgctggtgggtgtaaagtggtgcatccactgtggaaaatttgtaggttcctcaaaaagtcaaaacatggagttatggtataaaactacaattccattcctcggcatatgcccaaaataactgaaaacaagtcatcagacactcatacaccaatgttcacaacagtgctattcacaatagccaaaaagtggaaacaacccaatgtccatcaactgacaaatggataatcgtgtggtatattcatacagtgggctatcagcttatcataaacatcgaggactgacatgctacaatgtggatgagcctgacaaacatcagccaagtcaaagaaaccagacacaggatgtcatgtatggtaggatttcatttttttttttttcttgagacagagtttcactctttttgcccaggctggagtgcaatggcccgatctcagctcactgcaacctctgcttcctgagtagctgggattacaggtgcctgacaccacgcccggctaatttttgtatttttttagagacggggtttcatcatattggtcaggctggtctcgaactcctgacctcaggtgatctgcccaccttggcctcccaaagtgctaggattacaggcgtgagccactgtgcccagcctggtatgattccatttaaacaaaatatccagagtaggtaaacccacagagacaaaaagtggttggtggtaccccggagctgggataggcaaaatcacacacgcagggccacaacccacacccactcggagatgttccaggaacaatctcaggaacctgcatttgtaaaaatcctccccaataccccatcagaacacagagccactggtctatgggccaggagcccaagacctgagaacaatcctagtttcttcaacaactagcaacatgactgggcaactcacacccacctctgctcatcttctaaactgtaaatcagagtccatatggcttgtattattcacaaggtttttgtgaaggcaaacgggggaacatggccaccactggaaaaagtggaagatggaaagttagtgatctgaatctgaacctttcattagacatctctgctctgagggaccatctgtggggtgagaagaaattgggctcagtgcttaccatgtggaaagggaggaagggctctccacatgggacacaagggacagccatgaaggacagaggctgacgagacctcccagggtgagctccttccagcactggctggtacctgttgcttctgcaaatgttccccagaccctctgcactctcgcaggtcagagtaaaaaaaggttggattctttcattttaaaaaaagtttgagacagggtcttactctgtcacccaggctggagtgcagtggtgtgatcatggcttgctgcagcctcaaactcttgggttcaaaggatcctcccacttcagcctcctgagcagctgaactaaagacgtgtacaactgtgcttgttatatttttaaaaatagagacaaggtctaactatgttgcccaggctggtcttgaactcctgatctcaagcaatcctccagccttggcctccctaagtgctggattacaggtgtgagcctccacgccctgccggggttggattctttttatttttttaaatttttaaattttttttgagactgagtctcgctctgtcgtccagtggcgcaatctcagctaactgcaacctccgcctcccgggttcaagcaattctcctgcctcagcctcctgagtagccgggtctacaggcgcacaccgccacacctggctaattttttgtattttagtagagacagggtttcaccatgttgccctggctggtctcgaactcctgagctcaggcaatccgccccccacagcctcccaaagtgctgggattacaggcatgagccactgcacccggcctgggttctttattaaagcaatgaattctggatgtcctggcttaactagattaagagggaatgaagcttcttctgaaggatcagtgttaccacagccatttccttgcattacaccgtccttctcaggacgtctatgagaagccctgggcagcctggacagggactgccccatgagtgctggtggctcacttggggctttctgcaggtgaaggaagcagccctgggagcttcttcctttggcacacagtgggcttcagctgggactgcaccaatcctctgctaacagcaaccatccttggggggtccgagggagcagctgcgtgacttttcagcagtggctatggtcactcctgaggcctgggaagagggtcactgtccagcagagctggcctgctccagagtgatctggaccttgtgccccttaacacaagaaggcccgactccaaaggccaacactgtcctctaagtttccaggacactaaatggccacttggtcctggttaactcatttctaaacacaaaggggacaggtctgagaaagtggcgttctctaccctaccctgagctcatctgttctgaggacaaaagggacgggtgtgtccaggctggtggcaaaggctgcatttccggggtttctttgctgtggaccccatgtctgaggaactggcccggggccttttgcttctggcttccgactccagggttcttcctctgtctcctgtccaggacggggctccagaagtccctgtcgggagagtcaggggaggggtgaggttagaactgacatgcagaagtggcaagtcctgaacacggtggctcatgcctgtaatcccagcactttaggaagctgagggaggaggattgcttgagcccaggagttcaagatcagcctgggcaacatggtgaaaccttgtctttaaaaaatgcaaaaattagccaggtgtggtgtatgcctgtggtcacagctactcgggaggatgcctgagcctgggaggctacagtgagctgtgatcacaccactgcactccagcctgggcaacagagcaagaccctgtctcaaaaaaaaaaaaaaaaaaaaaaagagcagcagacgataaggctgaaccaactttttttttttttttttttttttttgagatggagtcttcgctctgtcacccaggctggagtgtggagtgcagtggcgtgatctccactcactgcaagctccacctcccgggttcacgccattctcctgcctcagcctcccgagtagctgggactacaggcacccgccaccacgcccggctactttattttttgtatttttagtagagacgggtttcatcatgttagccaggatggtctcgatctcctaaccttgtgatccgcccgccttggcctcccgaagtgctgggattacaggcgtgagccaccgtgcccggccttttttttttgaggtggagtctggctctgtcgcctaggctggaatgcagtggtgcaatcttggctcactgcaagctccgcctcccgggttcacgccattgtcctgtctcagcctcccgagagtagctgggactacagggaccgaccaccatgcccggctaattgtttgtatttttagtagagacggggtttcactgtgttagccaggatggtctcgatctcctgacctcgtgatccacccgcctcggcctcccaaagtgctgggattacaggcatgagccaccgcgcccgaccggctgaatcagtttttatacagccatgtacaccccaccagccagcctcccttcacactgtgtccaactctgtaaggttgaggtgcgatgtgcctgctgccttatgttacctgacacctctccctcaagaatcctaagctttggagacattgtcccacactcacttggtaagtggactttcatgccggccctttttacagaggcagaaacccaagcaagctggcctgtgtggtagggtgggaaagacaagcagcctatgaccggcaacctgcggcccacctccatgcaggaaagtccagctctggatcccttcctgtcccctcaacaggcctttccagaccagctgctcatttacccaggacagtcagtcagccagcctggaggtcagataccatgtccttccaagtggggagacaagaggccagactgcatctcacttcaaatgtgggtctctcactgcaatggccatctctgggccccattagcactggtagccagttccaagtcccacagtttttaccaaacctctggtttctttctgtgcatgccgggctagtgacacatgtgtaagaatcatagtctgagactaaactcctttctaaaacaggaaccctatgaatgtaggcagggaccatcttgttgagcaaacttgaggcagagaggctaagtcatttgttcaaggttatactgctgagctttggaaccagatttgctcaactccaaagctcccactaggcctttgggtcattctcagctacttaagctctgttgtgcactggagcaggaggaaccattcaaagtgcctccacgtacaccattcaacttgatgcaatgtccaggtgccacttctcatgacacccagttcccggacattggcccaagctgtgtcaccctgggcaggttcctaaatatcatcggggttggcatcttcatctgaagaaatgaggctgggccaggcacggtggctcacgcctgtaatcccagcactttgagaggccaaggcaggtggatcacctgaggtggagttcgagaccagcctaaccaacagggtgaaacccccgtctctactaaaaatacaaaattagctgtgcgtggtggtgcatgcctgtaatcccagctacctgggaggctgaggcaggagaatcatttgaacctgggaggtggaagttgcagtgaaccaagattgcaccattgcactccagtctgggcaacaagagcaaaactcagtctccaaaaaaaaaaaaaaaaaaaaagaaatgaggctgatgcttatggtctgccaagggtcacgacagctgcaagggcacatggccatgggactgggaaggcctatgtactcatcctggtgtctgttgctatgggaccctgagcaatacccacttcatgtgtctgggtctcacctttctcacttataagtaaaattgtgatcataatgcttacccaatgaggatggaagatgcacaggaagtatacttagcatagtgccaggcatagggcaagtgacaccattactggtagctaccctttaatttggaatgaggactgtacaattatcaccttgctgaaagtgatcaagtgaggaaaagtgaggtgcaaggcagcccaggtgcccctcccaatcccaccatgaccctgccttgccttctttctgctgtccccagtctctgaggtaaacacctgaaaactgaaggcagggattcccatgcccctccctgcctcacctggagcggtgttctcatcgacccactggaaaaagccacactgctgctctctcggcttggcacatgtgtggaactggcgccccttgttgggtccatccttctgcacagtccgtgtgacggagggctggctgcaaaggcaggatgtgccactaccactgccatcaccagggttgccaaacccacctaggtggatccctgggcctggtgggcatcccagggaggcgcccaggggtctatatgccaaggcaggaggccctcctgctcccggattggggctgtctgcccacaggaagaagttgcagctacctccgttgcacttaaagaactgccggccccggttggggccctccttacggacagtgagcagcacagcctcctggccacagttgcaggtcacagaattgctttcaccagcagccgtgggtggtgggagggtctgggccagagcctttgaggacccagtctgtctgctgtcagcaggctgggggtgctggctgttgtccatcctgttcagggactggttagcctgcaggcggccagagggctggctagccctgggggggccccctgaaaatctcaggtccaggatctccctcagggtgtcgtcgcatccgccgatgcagcaaacaaactccagaggcatggtcgggggaaggctaccgcgcttaaactttaactttaacctagtgaggccagaagatgagaaaaaacattaacaaccagatgccagcttctccttagtccagtgagggctgctttagccctaggcctctctccaccattccttatgcatcaggaagcccacacaagtcccctgtgaggccctctatcagcccaccacaagcccccaccagtcatcacaggagtggacagtgggaaacagtgcagatgaaatctaagatcccagtaattcactaaaataaaaacacctctgagaagtcccatgtctctgtatcagcagttctccaagtgtggttccagggtgcctgagccctttcaaggagagtgcaaaactcttttataggccaggtgtggtggctcaaacctgtaatcccagcactttgggaggctgaggcgggcggatcacaaaatcaagagattgagaccatcctgaccaacatggtgaaaccccatctctaccaaaaatacaaaaattagctgggcatggtggcacgcgcctgtagtcccagctactcgggaggctgaggcaggagaacctcttgaacctgggagtcagaggttgcagtgagccaagattgtgccactgcactccagcctggtgacagagcaagactctgtctcaaaaaaaattctaagaggttatgtctattttgctcttattcttccatgtgtatacaacggagtttcctggaggttccagcacatgcaatgactcagcaggctgactgcagaagcagatacgggaatccagctctcttctattaagccagacatacaaattgcaaaatgtaaaacaatgtcattaatgtcattattattttgcttttgaaaataggtattttattaccctaaaaaacaagttatttacagtagtatgcaatgcatttactagaaataaattattaaaatttttttttttgagacagagtatcattctgtcgcccaggctggtgtgcagtggtgcaatctcggctcactgaaagttctgcctcctgggttcacgccattctcctgcctcagcctgccgagtagctgggactacaggcgcccaccagtacgcctggctgattttttgtatttttagtagagacggggtttcaccatgttagccaggatggtctcgatctcctgacctcgtgatccacccacctcggcctcccaaagtgttgggattacaggcgtgagccaccacgcctggccattttttgtatttttagtagagacagtgtctcaccatgttagccaggatggtctcgatctcctgtcctcgtgatccgcctgtctcggcctcccaaaatgctgggattacaggcctgagccaccaggctcggcctattcatttatttctagagacagggtctggctctgtcattccaggctggagagcagtggtgaaatcatggctcactacagcctagacctctaggatcaagcgatcctcctgcctcagcctcctgaccagcttggcctataggcatatgtcaccacatctggctaatttaaaattttttttggccaggtgcagtggctcacatctataatcccagcactttgggaggccaaggtgggtggatcacttggggccaggagttcgagaccagcctggccaacatggtgaaaccctgtctctactaaaaatacaaaaagtggtcaggcatagtggtgcatgcctgtaatcccagctactcaggacgctgaggcagaagaatcacttcaacccagaaggcggaggttgcagtgagtcaagactgcgccactgcacttcagcctgggcaacccagcgagactgtcttaaaaaaaatttttttttaaataaaaatttttttttttaaagagatggggtcttgctacgtagcccaagcttggatgttgtatttaatatgtgaataatttcctaagcctggtgtagcaatcatctatctggagagggcagggaaagagcccttcatggttctttgcccatggcccactccaaacagggtcatacctgccaaagcagtgacagcatggaacacaacagaactggaccagccctgctgaactggctgctgcagaacacagctacgcccctgcagggcctgagtggaatccccgacactcctctctgggttctggcaggagcaagggaaagatggtgtacacactccagaggaggcacctgactcaggtgcccagctcacctgtacacagggtgtggctgacaaactggacacacactgctgtccctgctggcctccagcaccgagtcaggaagccacacagctgagcgacactctgggaaacccatgcagctgaggtagaacctggggacaaagtgccatgtcagatgataggagtgcaggagatgctctccgctgttggccatcagctaaggcagcctttcctcagctgcccgaggacaacattcccttttctggatgacacttaactggatacacaagcactcatattgaattgattgggaaaaatgagccttctcacatcccaaaagcacaaagcagctattgctggccctgctttctatttagaaaaccaacaaccaaccaagctgacgccaggggctctgtgctgtgcactcacacattcttgcctttctgcctcgtgccaagtctgggcagtgtcaggggccccctcagtttgcatgtgagtaaacagtggcttggtgtggcctggaaacctgcccagagacatgcatgcatgtgtggatgggagccaggaatggaaacccatctgtttgtgacaaagcctcacctgcaacatctacaccccacccactgcccatccatcccatcccggtctctcctggccaatgtttttcaacaccttgcagtcatgaaacgttagggtttgactagctaatatgcatgtgatttacaaattcctcatgagtgtgcctgggtacactatgaaggaaaaaaaagccccgaactccaatcatttaaataagaaatttacaatctcagaaatggaaattaacagataaatcatggagtggcaaatcccacaagataatctcctgaccttctggagtaactcagagaagcattacaaaagaataacagaagaacaaacgaataactaaagaataataataattctccaattcagagaattggagaattcagagctaaaacaaaagtagttattctctctccttatattccaatgagtactaatccaataacctaccgatagcaaggaaaacccatcgacagcatttattaagtgctgaaatatacgcccagtcattgggctaagcctagagtggcactggcttctgtctgtgagtgacgcgagccctgacacctgcttccaggtctggcccatagacctcttgtttctgagagcctgggtggccttctcttcacttgggccagccaggttaatgatggctggaggtgaggagttgagaaacctcctttcttattcagcagcaaggagcacagcagtcccaggtgggccaggcaggatggaaaaaggcagtgaaaacccggtttcaaactctgctgcccaccacggctgcttgactccaagcaagcacctcagccctctaagctgcataaaaatccctgccttgcagggtagttaggagaatgggatgaggtaatgcttacagagcaccaccctgcattacaccagtgagggacggcacctgatgaatgatggctgccacccctccacctcgtctttccccgtgaacttcctccagtggccagccactggctccaacaacctgatgtgaagctaaattgcccactcagatctactatatttaaagcgaaaagggagttgagattttcaggccccattcagaactaaaactaggagagaacaaaagtagtatctgctgagtatctacaacacatcaggcaatgtgctatatagtcctgaccattttcaccaaatcctcacccttaacacagccttgtaagtactgacattttataaaagaagaaattggggttcagagcaggtaagtaacttgcttcaggccacaccacttatatgcggcataagtggcatttgaacccagacccacctagatctgaagctcatgctcctccatgtgttacacattgggtatatgatgtcctatccacaggggacaaaaaaaccccactatcattcagtttctcacctgctctgaattcccatagtgctttacacctcaaaggcctgatcccaccctgctatgcttttaggccaacaccttgcctgcaggttggcaacaacaggcctgtcttgaaagattccatggagtgaaatggcagggtctttcgagctacggctgacaccgcaggtgctggggagcagaggtgggggcagaaggcagcgcactcacccgccattcttcttggtcttaaggaccatgtccttgttgcactgtgggcacttcctgatgggctctggcatggctgggtagatatcttcttgctgggccaactctgtcccattcccaaagtactgggccaaggcctcgtccaatctgaagaaaaggcaaagacagacacccatcagccagcaatcgctgcaaaggcacctacaacactcttacatgcacacaacaggcgtgaccttgagaaccagctggtcagtgagccgcaggcctcctgcagagaacagacggcagacagaagactgagctcaccatgggccctggtgccgaaccaactcttgggaggagagtccagatacaggcagatgcttctgcttgtcaccagcccacattaaaaagtaaaactgggccaaatgtggtggctcacgcctgtaatcccaggccgaggcgggcggatcacctgaggttgtaatttcgagaccagcctgaccaacatggtgaaaccccgtctctactaaaaatacaaaattagccaggcatggtggcgcatgcctgtaatccaagctactcaggaggctgaggcaggagaatcgcttgaacccaggaggcagaggttgtggtgagccaagatcacgccattgcaccctagcctgggcaacaagagcgaaactccatctcaaaaaaaaaaagtaaaactgcacagggtccatgtacaaactccaggagtgtctgtctgtattaagtctaaactagctcatgcctgccttttcacaactggcatggggtactctaaagaacagaaaataacaaactgttatcttctattacagtctcacaacacacatcagacaccagatgtatgggagttttccccatacaccaagcaactctcccgccacacaccagttggacatcctctaattcaattcaattctgacactatgcacctggagatccatctaacggttaagggctcagtcccagaagactgctgccccaaattccctcagatgtcagtcacaaatcccaggctgtgacctgtgcttctgactgactggctataaactggggttcctcagaccccctccttggtttgattctcaatagagtggctcacagagctcagggaaacactttacttatgcttacccgttaattacaaaggatccaggtgaatacccagatggaagcaatgcacagggcaagggatgtggggaaggggtagcttccatgccctctcccaaacacccaccctccaggagtctttacctgtttagctatttggatgtgccccaaacccaattgtttgatttgtttttgttgttgttgaagaagtctcactctgttgcccaagctggactgcagtggggcaatctcggctcattgcaacctccaccttccgggttcaagcagttctcctgcctcagcctcccaggtagctgggactacaggtacgcaccaccatgcctggctaatttttgtattttttttttttttttttagcagagaaaggggtttcactgtgttggccaggctggtcttgaactcctgaccttgtgatctacccgcctcggcctcccaaagtgctgggattacaggcgtgagccaccgtgcctgacccttgtttggggattttatggaggatttattacttaggcatgattgacaaatcactggccacgtgtgatcaactcaacctccagcccctctgctcttcctgaggtaggggtgggactcaaagtcccaaccttctaatcacagggttggttccctgacaaccagaccgatcccaaggctacccaggagcccttggccactagtcatctcatttgtatacaacagacacagcacttaaaaaattccaagggtatcagaaaatgaagtccaaatatatatatcttattataaatcataatatcacaggtagaaaacacatcatttctaacaaaatacacacatgctgcttgctaaatatccacctctaaatgctccagaaaacaaatggatcacactccagcacttgggtttactgatttaaaagactttgttgcctaactcaagataattaatgtgtcatgtaattaaagcagaaaaaaaaaagataattaaaatcaagagaatggtatttctaaagccaatagttcagaataactgaaggagactgttccgattactgtttctatactgacaaagctctatggagagttgtaaaagaacccagagaagaaagtccaaagaaaaggggtatgtggaaaacctccaggccaggaggccactggtgaggatgaatctggcagggttataaactctgactggcccagatgcggtggctcacgcctgtaatccccacactttgggaggctgaggtgggaagatctcttgaggccaggagttcaagaccagcctgggcaacatagtgagacccctctgtatttcttttaaggacttacttctttgctttagccaccgcttcaatgaaaacctgcttgtatttctgcacttgctgccttagaaccacaaatttgtcctttttgccatcacagatcagcttcagatcagcttccagttcagcccggaggtcaggcttagacatttcatagcccatggaatcataacctgcagggagagagtcgagctcagtgagggcccacctgagaccctcagggacttgggcgacaccacccactacccactgcaagctctgtcctcccttaccttccacaagtcccatgcccaggtgcccagggaggaaccgcttgtctggggtgaggcccacgtacatccgggctttgatggtctcgatgtgctccgcatgagtggcatccgtacctggaagccacttgctggttactctgaggtaatacagacaacagctccacccgggtggcgcatgggcaccttgctcaccccggaatccctcctttgcctggacagcctatgcaggtaagatgccttcatttcattcccatatagctcattcaagaaatcacaatggcaacctcaactctcttgttccctcacatcccattactcaggaaagctgtcaattccagcttcaaagctctttttaaaaattctcttccccatgtgtccaagccatacttgcagcttgtgtccctatttctagtctcttcctctaccctaaccattctttaagctgtggccaaagggacctttcaaaatgtagctctgccatgaaggaaatgcaaattaaaactgcagtgaaggctgggagcagtggcttatgcctgtaatcccagcattttgggaggccaaggtgggcagatcatctgaggtcaggagttcgagaccagcctggccaacatgctgaaaccctgtctctatcaaaaatacaaaaattagcagggtgtggcggcacgcacctgtagtcccagctgctcaggaggctgaggcaggagaatcacttgaacccaggagacagaggctgcaacgagctgagatggcaccgttgcactccagcctgggtgatggagtgagactctctttaaaaaaaaaaagaaaaaaaaaagggctgggcgtggtggctcacgcctgtaatcccagcaatttgggaagccgaagcgggcagatcacgaggtcaggagatcaagaccatcctggctaacacggtgaaaccccgtctctactaaaaatacaaaaaaaaaaaaaaaaaaattagccgggtgtggtggcgggcacctgtagtcccagctactcaggaggctgacacagaagaatggcatgaacctgggaggcggagcctgcagtgagcggagatcgagccactgcattccagcctgggcaacagagcgagactccacctcaacaataacaacaaaaaaacaaccaaaaaaaccagtgaaatagcagttcagacctactggcaaaatcaaaaagagagataatactaagtgttagtaaggatgtggataaactggaatcctagtgccttgctggtggaaatgaaaaacggtacagccacttcagaaaagtttggtggttcctaaaaatgttaaatgtagagttaccaagtaaaccagcaatcccactcctaagtctacccaagagaaatgaaaacacatatccacacaaaaccttgtacaaaactgttcacagcaggattatttataatagccaaagagtagaaacaactcaagtgtccatcaactgcaacctctgccttccgggttcaagtgattctcttgcctcagcctcccgagtagctgggattacaggcgcctgccaccaagcccagctaattttttcatttttagtagagaaagtgtttcaccatgttggtgaagctggtctcgaactcctgacctcaagtgattggcccaccttggcctcccaaagtgctgggattacaggtgtgagccactgtgcctggctctttataggaaataactaaagtaggcaaatctggccaggtgcagtggctcactcctgtaatcccaacactttgggaggttgaggtaggaggacagtttgagggtgcaagttcaagaccagactaggcaacatagcaagaccctgtccctacataaaacaaaaaagtctggctgggcatggtggctcaggcctataatcccagcactttgggagaccgaggcgggtggatcatttgaggtcaggaattcgagaccagcttagctaacagtgaaaccccatctctactaaaaatacaaaaattagccagtgatgcgcacctgtagtcccagctactcaggaggctgaggcaggagaatctcttgaacctgggaggcggaggttgcagtgagctgaaatcgtgccactacactccagcctgggtgacagagtaagactctgtctcaaacaaaacaaaacaaacaaacaaaaaacccaacaaaaaaattagctgggtatggcaacacatgcctgtagtcccagctacttgggaagctgaggtggaaggatcccttgaaacccagggttcatggctgtgacctagcctgggtgacagagtaagatgctatctctccaaaacaaatttttttaggggccgggcatggtggctaacacctgtaatcctaacactttgggaggcctaggtgggcggatcatgaggtcaggagtttgagaccagccaacctggccaacatggtgaaaccctgtctctactaaaaataacaaaaattagctgggtgtggtggtgcgtgcctgtaagcctagctactcgggaggctgagacaggagaatcgcttgaacctgggtggcggaagttgcagtgagcagagattgtgccactccactccagcctgcagcaacaagagcaaaactccatctcaaacaaacaacaaaaaaaacaaaaaaactgactgtggtgatagctgcacaactttgtgaatatgctaaaaaatgtacattatacatttgaaggagataaactgtatggtatataaataaagctgttaataattatatatatatatatataaattttttttttttttttttttagatggagtctctctctgtcaccaaggctgaagtgcagtggcacaatcttggctcactgcaacctccacctcccgggttcaagcaattctcctgcctcagcctcctaagtagctgggattacaggcgtcagccataacacctagcaattttttgtatttttagtagagatggagtttcaccatgttgtccaggctggtcttgaactcctgaccccctaccttggtctcccaaagtgctgggattataggtgtgagacacaatgcccagcctgttaataatcttttaaaaatattattattatttttttgtaagtgtacctctatgtggttcctttacttagaaatcctggaagactccctgctgaccatgtaccaccatctaagcccttcaactgggcaagccaaggccctgcaaagtcaggcttggatcatctttccaggctcaccttctatggccacccccctccaatccagctacagcaggcttctgctttcctgctcctgtgcccttcctcaggcctaccctgcactgggctgcccttcgctgatccagaagtcttactatgaggttttggtccagctcaaatgccagtccacccatcacattttcttccctgcctactccctgcagaactattacattgtattcaatgtgttggtttggttcttctgttagattgagaacttaaaaaatgaggtcttattcctccttgtgtccctggtgcttagtccaagctctcactcttgtgggcctcacactttgtacctcagtctctgccttccgggctcaagtgatcctcccacctcagcctccctacctataggcatgcacctaattttttgtagaaatgttttttttgagatggagtctcactctgtcacccaggctggagtgcagtgctgcgatcctggctcactgcatcctccacctcccgggttcatgcaattctcctgcctcagcctcccaagtagctgggattacaggcatgtgccaccacgcctagctaatttttgtatttttttagtagtgatggggttttgccatgttggccaggctggtctcgaactcctgaccttaggtgatccacccgccttggcctcccaaagtactaagattacaggcatgagtcaccgtgcccagccagatctgttttgttgttgttgttgttgtttgtttgtttgttttaagacagagttttgctgttgttgcccaggctggagtacaatggcacaatctcagctacaggtgcccaccgccatgcctggctaatttttgtatttttagtagagacagagtttcaccatgttggtcaggttggtggtcttaaactccctacctcaggtgatccacccagctcagcctcctgaagtgttgggattacaggcgtgagccactgcgcccagcaagatggggttttaccgtgttgcccaagctggtcttgaattcctgggctcaagtgattcacccatcttggcctcccaaaatgctgggattacaggtgtgagccaccacacccagccttcatacatttttatcaaataaatcatgacgggtgaacctctactaattttacctaaacctgcagggtttctggatgtcctagtgatggtcaaggacttcacgttgaagcactgcttcccaagtcataggcctaagaaactccctttgtggatgacgcagctgcttatgtaacacatgcccagggagctctgcttcccctccactgtgctgcaggtattcctggactaggtttgccagagaaagcccttgagagccttgacaaaaacgaatggaggggacagcagattagttacaaggccctacctgcaaagcttgagccatgggacttatcagcagggtcctggcacatacatgaggccagcgtgagcagcctgagtgagcagtgtgggttcagacctgcagagacagctgccaccctcacccaatgctccacatgggaaggaggctcagggctctatctgacacttcaaaatgaagatagattttatgataactgtcccaagttttaattgttggttccttacatgctgttcttattcgaaagaacaacaaatcctcatgtggccaatgggtgctcccagttgggccctcaaagccatgggaaaagtctctgttactatgtggacagcacagtgcatggtttaagagcactgactgtggagttattcagaccaggttttaataatacacactttgtgaacttaggtaagttcttaacctctctgagccttatttcaactataaaatgggataaagatatagcagctgcattagagaatggtttgaagactagaggaaacctgtacctggtacactgtaagccttagctcaagagatgcgagttacccagaggagccactgaccaatgccatgcttctccatgagggcaatgaggtcggcctcggtgagcagcttgggtgggctggtctccccgtccaccatctccacggtgctgggctgaaagtgggatccttgctcatagacagggaggatctacagggagcggcaggtgcaacagtcagatgattccatcagcacactcaggcaaaaaataacctcatttcaaggaacatgatcctgctccactagagaactcagggctcacaacacaactgtcctccctctcactggggaccactctttattaccttgtcactccagtgatcatatggatacacatccagatagtttcgggccagaatcatgaggccatgggccacaaagcgttcctgagcgatgtcgatctccactgtggtctcctgcccctgagcatcctgggagcagcaagccaggaaatggcgaacaataaactcgtacagtcgctgttcatctccctaggaagaaaagaggagtacgaaactccccctagaatatcacctctcaaggacaggagcatcactggtagccttagcctaatgtcctgcacagaagaggccacactgctcctcaggccctgcactaacatggagtgccaggcaaacaagtcctggggagaggatgggtttaggttgacacatctcacaactcaaatctggcaaagataagcaaaggagtcatcttcccttccagactgggaagtggttctttgatgtaaacgcaatctaagcagaaaacaagatgaaagcgtaagaagttagcaagacactcctcaaatacaagagacagcaacattgcacctggtggccttagcccaacttcatgcacacatttaagcagtaattttcagggtaattttcaattaggtaatcaatgatttagtgagcctcagtctatcaaaagcccatgagacatttatacacatatccaataattccccttctaaggatttcttcaaaggaaataactggagaaccacaaaaatatttatgtctacaaatgttaactatagtatcaaaaacacacaaaaaacagatttggcaaaataaattatggcacatctttgtaattgttaaatatcatgcttaataggcaattttacccccttataaacttttgtatttcttaatttgtctaaaatgaacatgtaatttttttttttccgagacagagtctcactctgtcgccaggctggagtgcagtggtgcaatctcggcttattgcaacctccgcctcctgggttcaagcgattctcctgcctcagcctcctgagagttgggactacaggcacatgccaccccgtccaactaatttttctatttctagtagagatggggtttcaccatgttggccaagatggtctcaatttcctgacctcgtgatctacccgccttgtcctcccacagtgttgggattacaagcataagccaccgcgtccggccatatttttaaaatcagaaagaatgtattttattaaaagaaggaggagaagaacaaaagactaagatttccccagctttgtgagaagcctacagatgtaaacaagcatttccccaactttgtgagaagcctacagatgtaaacaagcctaatggctcctgtgcctgcagagcctgcccctggctgaggaaatgactgagacagacaagcagagctgtgtgggaaactgcagtgacagggggtggcacgactggggtggcagcaaagtttcaggaggcaaccaaaactgagccagccttgggaggatggatagaattctctagttccagggactgggaaggccacaaggctcacagtggaggtgggggtctgcacaggggttgcctatgaaggactagcagggaagcagcaggagctgatggagagtgggatgtggagctggattaagacgggggcccaccacggggagggatgaggcggtctttatcaaagccaggcagaggattgtgaaatgagagagatctcaaaatcacttgtttttacaatcacagcccacagagtaaattcaaaccttactactgacccccagcacttccctatgggttccagcaggcagtacattcagggaaaccaacctgtaagttgttggtgtatttggtggggtgaatgggagggtgagcttggtcagacttgttcccattgcgtggggtgggaccaccccgctctagaatgctctgggcaaaggccccccagcgtggatcgggggtctgctgttccaccaacaccgtcaggtttaagtctctgggaaaaatgtttgtttctgttcggggatagctgatgtacctaaaaccaaggcaaacaaacagaaaaagaaattgctaggctctctgattggtctataaacaactgaaagcacacactaacacctgcaaacactcatctgatgtagccaactcaactgaaggcagcctacattacctgcttcagaaaagttctgagatgagatgcaccccctcatgggatgaaaagcagctggctctcctgctagcacactcaaagaagccaaaaggggcagcacagcacaggaaaaaggccagcagcctcatagcctggggcttgtcactggccactctgagggtcagtctgacagaccagccctgatgcagcacatgagactcactgaccctgacaagttccaccagcgtgtgcttcaagacttttcttagagtacacaaagaacaatgctgtccgataaactgtaatgtggactctatttgttttttctttttcatttttgagatagtcttgctgtggcacccaggctggagtgtagcagcgcaagcttggctcactgtggcctccgtctcccaagctaaagtgatcctcctgcctcagcctcctgaatagctgggactacaagtgtgtggcaccatgcctggctaatttttttttttttttgtagagacagggttttgtcatgttgctcaggtcggtcttgaactcctgagctcaagtgatcctcctgcctaggcctcccaaagtgctcagatttcaggtgtgacccaacatacccagtctctatttgtaatttttgtttccccccaagagacggagtcttgctgtgtcacccaggctggagtgcagtggcgtgatctcagctcagtacaacctctgcctcccgggttcaagcaattctcttgcctcagcctcctaagtagctgggattacaggtgcctgccaccacacctggctaatttttgtatttttagtagagatggggtttcaccatgttggccaggctggtctcgaactcctgacctcatgatccacccacctcggcctcccaaagtgctaggattacaggcgtgagccaccacgcccagcataatttaaaattttcaattagtcacttaagttactgagattacattctatttcatagaagtcttcaaaacccaatgtatattttacatctatagcgcatcccaatttggacaacttgaatttcaactgctcaatagctgcaggctggacagcacagttagaggacctcagtgctggggtgtatatgactggggcggggaggagtttcacaggcaaacaacttttaaaggtgccacccactgtctgccacttgccagggccacagggagatggctgaggagtcaaaagtaagatctgaatctactctatgggtttttacatagaaacaccttttctgtatcagaaaagagaagtcaaagtcaaaatcctacctcagagcttgggtgctatctagacaatcagtttttccccataaactcttatttctttatttctttctttttccttttttttttgagatggagtctcactcactcaccaggctggagtgcagcggtgtgatctcacctcactgcaacctccgcctcctgggttcaaacggttctcctgcctcagcctccccagtagctgggactacaggcgcacgccaccacgtccagctaatttttgtatttttaatacagatgggatttcaccatgttggccaggatggtcttgatctcttgacctcgtgatctgcccgcctcagccacccaaagtgatgggattacaggtgtgagccaccgtgcccaacccataaactctatttctcaaatatttcatcctgataaagacggttcaaattctactcccaaacccaaaatacttacccttgagtgtagagcttctcagcaatcctcatggtttctttagcatttattctcaactttcgagaagccagcttctcaagctcctgtgaaatgggtcaacaggcatgttaggtgtactgcatgggtcaggcagcacaactcaaatacacaactcatcttcagtcaaatctggcccgtgtcactccaggtgcttctgtcaaacagagctgaaaaggctgcccaacaacgatttctgggcctgccaagcagagtcagatcctagcctagtggttctcagactttaatgtgtgcaggactcaactgggaagccagcagatttggggccctgaccactggggaaggtgctatgttgcgcaggctgatcttgaactcctggcctcaagcaatcctcccgccttggcctcccaaaatgctaggatcacaagcgtgagctaccatatccagcccaaactccacatttttttttttgagacggagtctcgccctgtcgcctaggctggagtgcagtagcatgatctcggcccactgcaacctccacttcctgggttcaagtgattctcctgcttcagcctcccaagtagctgagattacatcaccaccatgcttggcaaatttttgtatttttagtagagatggggttttgccatgctggcctggctggtctcgaacacctgacctcaggtgatctgcccgcctcggcctcccaaagtgctgggattacagaagtgagccaccacgtctggccaaaactctgcattttaaaaatttttttattttcgagacagtctcgctcttgttgcccagactgcagggcagtggcacgatctcggctcactgcaacctctgcctcctgggttcatgcgattctcctgcctcagcctcctgagtagctgggactacaggtgctcaccatggctggctaattcttgtgttttcagtagagacggggttttgccatgttggccaggctggtctcaaattcctgacctcaggtgatctgcctgccttggcctcccaaagtgctgtgattacaggcgtgagccaccgcgtctggcccagaaatctacattttttttttttttcacatggagtcttgctctgtcatccaggctggagtgcagtggcgtgatctcggctcactgtaagctctgcctcctgggttcacgccaattctcctgcctcagcctcccgagtagctgggactacaggcacctgccaccacgcctggctgattttttctatttttagtagagacagggtttcaccatgttagccaggatggtctcgatctcctacctcgtgatctgcccgcctcagcctcccaaagtgctgagattacaggcgtgagccactgcgcccggcccgaaatctacattttttaacaagcagtctaatacactgctttaacacagacagtctgagaaccacactttgggaataccacccaagccccagtaaattctcctggagggtgaaaataatgagctgttcttttccctaggtgacaagctaacaatgctgatgactatacgtcacactacagcacacttaaccagggaggactaaaacacatatgcctactatataaaatcaatgcagctgggcacggtgggtcatgcctctaatcccagcactttgggaggccgaggcgggcggatcacaagttcaatagattgagactaccctggccaacatggtgaaaccccatctctactaaaaatacaaaaattagctgggtgtggtggcgcgcacctatagtcccagctactcaggaggctgaggcaggagactcgcttgagcccgggagacggaggttgcagtgaaccaagatcacgccactgcactccagcctggcgacagagcaagactctgtctcaaaaaacaaacaaacaaacaaacaaaatgcataacttcccccatgcaatccctccacacatatacacatttattgtggcttgaccaagacaaaagaacgcactgaccaccagtccctgtgtgcttcttagcctccatgcttgttagcctgagtgttctgtatgtccaacctccagagtgaattctaatagtaattctatcccaaattttcctgctaagtggtgactgagaaggcatactcctaatgtgatttactcagacttatgttctgtcagggtggctctttctggggtcaaataatttgagaagccctgttctaaagtaggttcatatagcagattatttaaagcaatatttatacagattatacagcaacatgaaaaaaatgcttgggtggaaaagctactctaattataatgctgtaaaaatatgcatattaaaaaacaggaagagatactagtaattatgtaaggatggtgaagccataggttgtcttcctctttttgtttcccaaacctcatacaatgcagttatattgcatttgttaacaaaaacaacaaaaaaaaggccaggcgcggtggctcacgcctctaatcccagcactttgggaggctgaggtgggcagatcacctgaggtcagaagttcgagaccagcctgaccaacatggagaaaccctgtctctactacaaacacaaaattagccaggcatggtggtgcatgcctataatcccagctacttgggaggctgaggcaggagaatcacttgaacccgggaggcagaagttgtggtgagctgagaccgcaccattgcactccagcctaggcaacaagagcgaaactgcgccctgtccctgtccctgtccctctccctctccccacggtctccgtctccctctctccacggtctccctctgatgccgagctgaagctggacggtactgctgcctgattctcctgcctcagcctgcggactgcctgcgattgcaggcgcgcgccgccacacctgactggttttcgtatttttttggtggagacggggtttcgctgtgttggctgggctggtctccagctcctaaccgctagtgatccgccagcctcggcatcctgaggtgccgggattgcagacggagtctcgttcactccgtgctcaatggtgcccaggctggagtgcagtggcgtgatctcggctcgctacaaccttcacctcccagcagcctgccttggcctcccaaagtgccgagattgcagcctctgcccggccgccaccccatctgggaagtgaggagcgtctctgcccagccgcccatcgtctgggatgtgaggagcccctctgcctggctgcccagtctggaaagtgaggagcgtctctgcccggccgccatcccatctaggaagtgaggagcgcctcttcccggccgccatcccatctgggaagtgaggagcgtctctgcccggccgcccatcgtctgagatgtggggagcacctctgccctgccgccccgtctgggatgtgaggagcgtctctgcccggccgccccgtctgagaggtgaggagaccctctgcctggcaaccaccccgtctgagaagtgaggagcccctccgcccggcaaccgccccgtctgagaagtgaggagcccctccgcccagcagccgcgccgtctgagaagtgagaagcccctccgcccagcagccaccccgtctgggaagtgaggagcgtctctgcccagcagccacctcgtccggcagggaggtgggagggtcagccccccgcccggccagccgccccatccgggagggaggtgggggggtcagccccccacccggccagcctccccgtccgggagggaggtgggggggtcagccccccgcccggccagccgccccgtccgggaggtgaggggcgcctctgcccggctgcccctactgggaagtgaggatcccctctgcccggccaccaccctgtctgggaggtgtacccaacagctcattgagaacgggccatgatgacaatggaggttttgtggaatagaaaggggggaagggtggggaaaagattgagaaatcggatggttgccgtgtctgtgtagaaagaggtagacgtgggagacttttcattttgttctgtactaagaaaaattcttctgccttgggatcctgttgatctgtgaccttacccccaaccctgtgctatctgaaacatgtgctgtatccactcagggttgaatgaattaagggcagtgcaagatgtgctttgttaaacagatgcttgaaggcagcatgctccttaagagtcatcaccactccctaatctcaagtacccagggacacaaacactgcggaaggccgcagggtcctctgcctaggaaaaccagagacctttgttcacttgtttatctgctgaccttccctccactattgtcctgtgaccctgccaaatccccctctgtgagaaacacccaagaatgatcaattaaaaaaaataaaaataaaattaaaattaaaaaaaaaaaagagcaaaactccatctcaaaaaataaaaaataaaaaataacaggccaagcagtggttgggtgtggtggcttatgcctgtaatcccagtactttgggaggctggggctggagaatcacttgaggccagaagcttgagactagcctagtcaacatagtgagattccatctctaccaaaaaattttaaaaataattagctggtcatagtggtacatgactatagtcccagctacttgggaggctgaggtgggaagatctcttgagcccagaagtttgagtctacaaaaacaaaataaacaaaaaaacaaacagtgaggctaagcaggaccgtgtctttctccagtgttttcttgtgtggcctggtgatgggtgatattttcttccaccaagccacagtctaggcggtagaaccacagcctcaaaacagtaagtgttccccgagtgcctgaaacagcctgtctggaacataccacagtgtccaaggcttgaggccgccacttgctcttgggcttagatctgacctctaccacagttgccatgggatcctagaaagccaggaaagaaaagaccatgttaacctgttagtgcatcatctccatccttcctatggatagcccatgccaatccttctagatcacactgaccaccgccagctaagcccgcagtgacagcctagaagagtgccccacttaatgtcgcttgtagctgacagtatggtagacaccatcactactttcccactcaaaccaagattgtgaagggcaatttcacaagccttaaggtgcttccaccagagcctatgaaatccaacagcctatgcatcacctgagtacagttttctatgtacacgtgcacagtgctctttctgttgttgttttctttaaaatacagagatggggtcttgctatgttgcccaggctggcccagaagtcctgggctcaagcaatactcccataagccaccatgcttggcccagtgctcctttaaaaaaaaaattcaggataatacagttagaaataggagaaattgctgggcacagtggctcacgcctgtaatcccaccactttgggaggccgaggcgggcggattacaaggtcgagagctagaccatcctggccaacatggtgaaaatccatctctactaaaaatacaaaaattagctgggcgtggtggtgcacgcctgtagttccagctactggggaggctgaggcaggagaatcgcttgaacccgggaggtagaggttgcagtgagctgagatcgtgccattgcactccagcctggcaaatgagctagactttgtctcgggggagaaaaaaaaaagaaataggagaaattgtacaagttggagacctttaatcttaaaaccagcttcatagtttacatcacccaccacgtagtcccgcaccacatccgagtgaaggagaaacagggcaggtctttttattacttacttttatattttattattatttgattttttttttgaggcagtatctcgttctgtcactcaggctgaagtgcagtggcataatcatggctcactgcagcctcaatctgctgggctcaagcgattctcccacctcagcctcccaagtagatggaactatatgcaggtaccaccacgcccagctaatttttcttttttagaaagatggggtttcactatgaaacccaggctggtggtctttttatttaacaaataattgtacagtgtcacagagactcccagtggtccagggtcaaagggtggagtgagagagagatggagaaggcagcatggtctgcagaaggggcagggacacactaggactctgccatgtacagctctcacgtgtctgtgggttaagtctcttcactttctttagcttcctcatctggaaaatgtggatgctatcactgccttcagaggcattattaggattaaacaaaacaacacataacgaagtgtacctggtccatagcgggtgctgcacagttatcacatccctttgcctaattagtaacaaatctgccagtgggctacagccaagaagcacaccatgaattaagcctagagagctcggaattttacttaagcatgactctgtgcagcccctgggttaaaccaggctgttatgtgctaataggaagtggcatcagaaagtaaacaatcagcccaagggccaggaaacattagggtgggtcccaactctgccaccaactggcctatgacccgggccagtcttgctcccttctatgacacatgcgtgtcccacccaccccgccagccctttccctaatctctccagcctctgctcaagtgttacccctcccctcactgtccctccggcctttctctatccctttaccttgctttattttcttcctagcttttatcactatataaaattagcccactaatttgtgactttcacttctctagatgtcctcatgtgaccaataaagagggggctgagccaaatgctgttcattctctcctagctctataagtcaatgacctggactggtctagataatccttgctaatttctggtgatagtatatgccccaagaggggatttcaactatacgtttcccaaaatttctgattttatctaaaaataatgtagatacttcccttttccttttagtgctgttctcatggggttcgtcttattggttcccaaaaagtgatcccctgagatgcaaacttaaagctaaagtccaatgggagaatgagacagatcacctctgccgacagtgggagtggtttgggaggtgtgcagaatgtttcctagatcattaggggttcttacctccacacacaactgatagagaactaggcaagccgtgtggttaaagagtcgatgccttttccagttgaattctacgataccatctttgtggtcatgagttactatattaaggagagacaaacagaaaggctgtgtctcagagacatgtcatgatatgacagatagaaaaaggtttattgtggtgaaagtcaaacgaatatcaaatagggaggagtttctggataacaaagggaactttaagtggattgtaatgggccagggaggatgacagcaagactaaaataaatcacatctttattagtgctattaatgctcacagtccccctccttaaccttgagcccataggtcccaggccataacacccactccaggccctacctttaattctgtggaagatttctggtacaaaagcctgaatggctttgaaccgctccaccacaaagcccagtgtggggaactggcagctgccgtaactgatgagctgctctgccagcacctcaggaaaaatcctctgaagccgcagggtctggaacctagtaaaggcagctcctggagagtgaaggagagtgaaggaaggtgaaaatgatggataatgagagtccagggctggctgcacatatcgacacagagcccatttttggtcccataacacaacattaatgtggccatgggagaggtctgcctagctcctcaccaatcctcaggtccagctcctgcctcacatccacagcatcgctcaccctctgatcaggctcggtcaggttttcacaagctgtcctgacggcatggggtgtgatctcagagaatcgggctcgcaacacctgcagattgggctttactgcagaacacaaggtgttaccaaggtcaaagtcaaatcacactgccctccatcataaaggactcacttttcttaaagccccttgaaataaaggcaaaccagttcaagaagctgtgagatgaccaatttacctattaggttaaatcaatggtgtacagtgtctaaagaggaaacatcaccataacctttaaactgagtgtactgtcagaaatagtgatggagttaattttagctagtaactgtggggaaaagagagatcagatcgttactgtgtctagtagaaaaaggaagacataaagaaactccattttgatctgtactaagaaaaattgttctgctttgagatgctgttaataatctgtgacttgtcccaaccctgtgctcacaaaaacatgtgctgtattgactcaaggtttaaaggatttaggcctgtgcaggatgtgctttgttaaaaatgtgtttgcaggcagtacgctttgtgaaagtcatcgccattctccactctctattaaccagagacacaatgcactgtggaaggccgcagggacccctgcccaagaaagcctgggtattgtcaaggtttcccccgactgagacagcctgagatatggcctcgtgggaagggaaagacttacagccccccagcccgacactcgtaaagggtcagtgctgaggaggattagtgaaagagtaaggcctctatgcggttgagataagaaggcatctgtctcctgcacgtctctgggaatggaatgactcggtgtacaaccgaccatatattctattctgagataggagaaaaccaccttatggctggaggcgagacatcacggcggcaatactgctctgttactctttactgcactgagatgtttatgtaaaggtaaacataaatctagcctacgtgcacatccaggcacagcaccttcccttaaacttatttatgacacagtcttttgtttgttttcctgctgaccctctccccaccaacaccctatagtcacactgcattcccctccctgagatagtaaagatagtgattgataaatactgaggaactgagaccagcactggtgtaggtcttcacttgctgagcgccggtcccctgggcccacttttcttcccctttactttgtgtgtgtcttctttcttttctcagtctctcgtctccaccttgtgagaaatacccacaggtgtggaggggcaggccccctccaataactaaaatactaaaatgctcttggtgaacattttttttttggagacagtctcactctgtcacccaggctggagtgcagtggtgcaatctcggctcactgcaacctctgcttcctgggttcaagcaattctcctgccttggtctcctgagtagctgggactacaggcgcccgccaccacacctggctaatttttgtatttttagtagagacagggtttcaccatgttgaccaggctggtcttgaacacctgacctcaggagatccacctgcctcagcctcccaaagtgctgggattacaggcatgagccaccgtgcctggctgccttttgcaactttaatcttacttgctctctcaggccttttgagaaaagaaaaatattgtcaattaaagggttctgtaggggaatttcatgtcccttcagcaaagaatataggacatatacacactgtccttgaaagttaatgcacttaaatttccaggagtcattacagctttgaacacaaaaccactaaaggaaagtagcaaccccaccctctgagccagagaatggcctgttcatcactccctctaagttacccaaaaccattaacactgttagagcctttaaatccactgcaacaattatttattaatagtcgagcattgtataatatgagagattaaaaaagaaaacagaacattttataattattttttgtactttacttgtggtatattcattcttttatacatattcaatatgtaattttatttttctatttttgcttccattaaccaaatactaaaagaattcaatatataacaacaacaacaacaacaaaaagaatataaagtccctgttctcaaggagccgggtatctgcttgtatgcttgtacctaacaagaaatgagtcctgggctaaatggtttacaccactcattaactcatctaatctctgtggcagtcccaggaaacatgtcagattggcctgatgttagagacaaggaagttgaggctcccaatggctcagtgatttgctccaggacacatggctggtgggactcacagactgggagggagagtacctgcagaggacctcatccgtggcccatgtgcacatataaacaagaacactctatttatggagttccaaagtagagaaagtcagcagcagcagcagcacttaccagccttacacacgtggataatctcaaacccgatgttttcgccttctctatcacagtcagtccagatcaccagagcctggcactggcgagtctctcgttccaaagttttcttaagttcgcagtggaataagagtggtgagaacagaattgcacaacagtgacttgacatctctaagctaaggggatctgactgaaggttaatgctgctcttggagtgtgacaacttggcaagggaaagagaacagagaaaactgctctcattggtgctaatcatgatacaaccccttagaaccataaacgagtttctagaatagagggtttaatataacttccccaatatgacaaaacctgaaattcagctctaacacacacacacgcgcgcgcgcgcgcgcgcacgcacacttcgagaggttctgattatgacctagttaaaaaaaacgaagccggctgggcgtggtggctcacgcctgtaatcccagcactttgggaggccgaggtgggtggatcacgaggtcaggagatcgagaccatcctggttaacacggtgaaaccctgtctctactaaaaatacaaaaaattagccgggcatggtggcaggcacctgtagtcccagctactcgggaagctgaggcaggagaatggcatgaacccgggaggcgcagcttgcagtgagtcgagatcgcaccactgcagtccagcctgggtgacagagcaagactccatctcaaaacaaaacaaaacaaaacaaaacaaaatgaatcccaattgaatttcatccaaagttttatcagttctcaataaattaactggccaggctcggtggctcacacctgtaatcccaaaactttaggaggctgaggcgggtggatcacgtgaggtcaggagttcgagaccagcctggccaacatggtgaaaccccatctctgttaaaaatgcacaaattagccgggtgtggtggcaggcgcctgtaatctcagctacttgagaggctaaggcaagagaatcgcttgaacctggaggcagaggttgcagtgagctgagattgcaccatcatactccagcctgggggacaagagcgagacttcgtctcaaaaaataaataaataaataaataaaaattaaaaataaattaactatacatgccctgactgcttgacaactggcaatttactgtcaaacaggcatttatactttgtagcctctttcatctaacaaggggtgagatgggggctacgcgctaataatttacaatacttaggattattttttgatagggtctcactttctcaccaggctggagtgtggtggtgtgattacggctcactgcagcctcaacctcctgcctcctgggatcaagtaatcctccttcctcagccttactagtagctgggactataggcatacatcaccatgcctggttaaatttttttttttttttgagagatagggtctcactatgttgcccaggctggtctcaaattcctggagttcatgtgatcctgccttggccccacaaattgctgggattacaggcataaaccaccatgtccagcctttattcctaggatttaaacaactaccattcataaaaaaagtttacttcagtcccttggccacttagccacatttatacaatgggtgggaaccagctttttaaatcatggtagtgactttggtggaaaaccttatctccaaatgccaatgcattaaaaacaaagaaatcactctgtttgactctgtggtttgactcagtgccatatgtcttccaaaagaccctaccttgatgtctacaaaattctctgggcagtacttttcaatttctgcttcaaagaggacaagagggttgcagctctgcctagaaaagaaatgaaaacagagtcccaactcagtacatgacagagagccctccaatctaatgacagcaaactgttccaatgggttcatggtgtatccccaaaagaaaaggtcccggtgaattgaaagtaaggctatgaccctctgcatgacacactgtccacttctccaagagtgtgaacaggactgataagatggcattctggagccctttcacaggtaaatgcaatccaatggctgcatgaaaaaggtctggcaattttgaggaacaccaaaagtgactgtttaaagatttaataaaaattcacaatggatcagataatcctaggtcatcttagtattataaattactgctgggcgtggtagctcacgcctgtaatcccagcacgttgggaggccaaggtgggtggatcacgaggtcaggagatcgagactagcctggctaacacggtgaaaccccgtctctactaaaaatacgaaaaattagccaagcgtggtggcaggcacctgtagtcccagctactcgggagtctgaggcaggagaatcgcttgaacccgggaggtggaggttacaatgagtcaagattgtgccactgcactccagcctaggcgacagaataaaactccgtctcaaaaaataaataaaataaataaataaataaataaattaccaaggcacagtggctcacgcctgtaatcctagcactttgggaggcaaaagaaggcaaaccctgctttgtttaagaccagcctgggcaacagggtgaaactccatctctactaaaatagaaaaaattagctgggtgtagtggcacatggctgtaaggccagttacttgggaaactgaggcatgagaatcgcttgaacccaggaggcggaggttgcagtgagacgagattgcgccactgcactccagcctgggtaacgcagcgagaccctgactcaaaaaaaaaaaaaaaaaaaaaccgggcatggtggctcacggtctgtaatcccagcacttcaggaggctgaggtgggcagaccacctgaggtcaggagttcgagaccagcctggtcaacatggtgaaaccctgtctctactaaaaatacaaaaactagccaggtgtggtggcacgtgcctatagtcccagctactcgggagggtgaggcaggagaatcactcgaacccaggaggcagaggttgctgtgagccgagatcacaccactgcactccagcctgggagacagagtctcactctgaaactttgtctccaacaaaaaaaaaaaaaaaaaaaaaaaaaaaaaaaaaaaattacccagtaagatcaacatgcctcaaaattcctgtgaaatttcacaacttactataatctgaaagtccttcccttgagaattgtactgaccattttcgaaactgcatctggaaatcatgagccagtaaatgtccagaaactgaagtcattaccatggtaacattctgaatgatgacaaaattcaaaattcagttagtctttttgcagttattattctgccaaatcattaaaatgagagggaggagcttctattaaagacatttttaaaaacctgattgggaagaaataaacataaatataagctcttcaaagccaaaagtcacaggaatacaatcaccattctaatgatatggtgtataactgacgcctcttgcatcagttaaattttcctcaaactattgtatattagctttttttttttgtaatgaagagctgagatgggaccatattttattaaaaagagaactcctcataaattataaagtgatcaccccatatccaggaacctttaggttgttaacagttgttattcttaagacagcgacatattctacatatgacgaggctgactactttctcttgcttatgattgaaatattttagaaatattttagcacctacctggccatacagatgataatcaaattcatagatcttgttgaattttgaaagtccttctctctataaaacaaaaataagtaaaaaatataaattacgtttaaaacaatggattcctttgtataattctttctgatcctgaatttggcaatgatttcttggttatgataccaaaaatataaccaacattgctccaaagaagataagaaatggccaacaagcatatgaaaagatgctcaatgttattaatcattaggaaaacacaaatcaaaaccatgatgaggtaccactccatacccattaggataataattaaatagaataataaaaaaaacaagtaaaataacaagtgttgttgaggatgtggagaaattggacattgtcagtggaaatgtaaaatgctttggccactctggaaaatgttggtgtttcctcaaaaagttacagagttatcacatgtcacagcaattccactcctacaaatttacccaaaagaattaaaaacgcattcaaatacactttgggaggctgagacagttggatcactttaggtcaggagtccgagaccagcctggccaacatggtgaaaccccatctctactaaaaatacaacaattggccaggtgtggtggtgtgtgcctgtaatcccagttacttggggaggctgaggcaggagaatcacttgagcccaggaggtggacgttgcagtgagtggagatggcgccactgcactctagcctgggtgacagagcgagactgtctcaaaaaacaaaaaacaaacaaaaaaacacattcaaacaaaaacttgtacatgaaagtctatagaagttcttttttttttttttttttgagatggagtctggctctgtcgcccaggctggagtccagtggcgtgatctcggctcactgcaagctccacctcccgggttcacaccattctcctgcctcagcctcccgagtagctgggactacaggcacctgccaccacgcccggctaatttttttgtatttttagtagagatggggtttcaccgtgttagccagaatgttctcaatctcctgacctcgtgatccacctgcctcggcctcccaaagtgctgggattacaggtgtgagccaccacgcccagcgaatgtctatagaagttctattcacaatagtcaaaagatgaaaacaacccaaatgtccatcaactgatgtatggtaaaatgaaatatgatctatccatatgatagaatattattcagccataaaaaggaatgaagaggccaggtgcaatggctcatgcctgtaattccagcactttgggaggctgaggtgggcggatcatgaggtcaggagtttgagaccagcctggccaacatagtgaaaccctgtctctactaaaaatacaaaaaattagctgggcgtggtggtgggtgcctgtaatcccagctacttgggaggctgaggcaggagaatcgcttgaacctgggaggcggtggttacaatgagccgagatctcatcactgcactccagcctgagcgacagtgagagagactccttctcaaaaaccaaaaaaaaggaatgaagaactgatattaatacatggtacaacatggatggacttcaagattatgttaagtgaaagaaacctgacacaaaagagcatgtaagatatgggtccacttataggaaatgcccagaacaggcaaatccatggggaaagaaggcagattcgtggttgtgaggggctgaggagagggtaaggggagtgactgcttaatggatatgaggcttcctcttggggtgaaaaaaaaccttctggaactagataatgatgatggtggcacatttagtggacaaaattccactgaactatatacttcaaaatgattaaaatggtcaattttctgtgcattttaccactcaacctacatggctctctaagattcttatgatctgcactcaactgctgctcttgcttaactcatcggtgtctcttcccaccacaccacacccctaacttctcactgtttctgaatatgccaagcagtttcaagccactaggttgttctttacagtttctactgcctggtaaaactttcaggctcagctcaaacatgcattcaacaactatgaatttttttttttttttttgagacagagtctcactctgttgcccaggctggagtgcagtggcacaatctcggctcactgcaagctccacctcccgggttcatgccattctgctgcctcagcctcccgagtagctgggactacaggcgtctgccagcatgcccggctaattttttgtatttttagtagagacagggtttcaccgtgttagccaggatggtctcaatctcttgacctcatgatccgcccacctcagcctcccagagtgctgggattacaggtatgagccaccatgcctggcctaatttttttttgagatggagtctcactctgtcgcccaggctgtaatgtaatggcgcaatctaggctcactgcaagctccacttcccgggttgaagcgattctcctgcctcagcctcgtgagtagctgggattacaggaccccgccaccacacctggctaatttttgtatttttagtagagatggggttttgccatgttggccaggctggtcttgaactcacgacctcaggtggtctgcccgcttgagcctccccaactgctgggattacaggcatgagccgctgcgctcagcccaagtattaatatttattgaaagtttcctgcattccagacaccatattaggcgttaggacatagcaattaacaaaatataatcactgtcctttggagtttagagtccaaggagaggcagtgacaaaaatcaaataaatgatcgcacatcccattatttaactgtaactagtagatgcctttcaagtagaatagagtgctatgacagcatgtcagtaagggtctctgacctagtgtgggggaacaggtggtgagggaaggattccttgaagatgagacatttcagcagcctctctcctctagccgccccagatgccaaaaggaaagatggccaaggggaagaagtggccctggcccctgttgtcatggagcagcagtaggccaaaaaggtggtaaatcccatttgagaaaagccctaataattttggcattggatatctagcctaagggcctcacccactttgtcaaatagtcccgctataaatggctgctgcggcagagccgctgtactctataagtggctgatgtgccacctgggattgaccagttcacccaggcctcagactaccaaacttaagctactcaattgcttaagctggcccacagtacagacaagagacagagcaagggatgagatcgaaaccgttggcccaggctgagaagaaagcttccagcaaaggggatgtcgctactaagagaccacctacacttcgagcaggggttgacaccgtcaccaacttggtagagagcatgaagggtcagctggtggtggatcccattgagctggttgtcttcctgcctgtgctgtgtcctaagatggggattctctactgcaccgtcaagactgtggtgtcaaattccacaggaagacctgcaccactgtcaccttcacaaaggttaactttctggtagacaaaggagctctggctaagctggtgggacaaattacaacgacatatgagatctgctgtcactggggaggcaatgccctgggtccaaaatctgtagcttgcattaccaacctagaaaaggcaaaggctaaagaatttgccactaaactgggttaagtacacactgttgtgttttctgtacataaaaataaaaattctctttccaagaaaagtctttccttttggctggaactgccatcttggagtaatttgccaaaatgacgaacacaaaggaaaagaggacgaggcatctgatgtatgttctcctggccttatagaaaacatggagttcgagctgggcacggtggctcacgcctgtaaccctaacactttgggaggctaaggcgggtggctcacctgaagtcaggagttcaagaccatcctggccaacacagtgaaactactaaaaatacaaaaaattagctgggcatggtgacaggcacctgtaatcccagctactagggaggctgaggcaggagaatcgcttgaacccgggaggcggaggttgcagtgagctgagatcacaccattgcactccaggctgggcaacaagagcaaagctccatctcaaaacaaacaaacaaaacaaaacaaaaatatggagtttctctggccacagacaccagaatctacaatgaaggtgatattgaggacttcgtgagaatgcatactgttcaaaagggaatgacccacaaatgttacatggcagaactggaaaagtctatgttacccagcatgctgttggcactgctgcgaacaagggctagattcttgcccaaagaattaatgtttctattgagcatattaagcactctaagaaccaagatctttcctgaaatgtgtgaaggaaaatgatcaaaaaagaagcaagtcaaagagaaagggttcacctgaagtgccagcctgttccattgagggaagtacactttgtgagaaccaatggaaaagagcctgagccgctggaacctattccctatggattcatggtatgatagggtaaaaatagataaatacaagacctctggattgcttaaaaaaaaaaaaaaaaaagggagagagagagaatgaattcagcagagccttgaaggataagaagttaggcgtaggagaaccatttttcaatgtctacttcattgtctagaagtagacaaaccttggggctggtcaccaggacttctagcactggaaacaggtaaagctgtcagccagcattcacacaaccctggctccactcccactatccttgatctggaaacaggtcttaggaccctgggaactaaagaaaaatgagcagggaacttccacccatgctcttagaaaagttctccagaaaaccatttcaggatctacttttgttatctgagatattttcctggacagctctttatgtctcccgtggcacctcctttatgaaactttttcttatcctcccttgcgtttgtgcctcccgtgtgtgtagaacacattcttaccacttacctctctcagaatcagttcattcgggtaggaacagggctgacttcaaatctaatccccaaaccttaccgtgttgctgtaagtgtgcactgtgaggctggaaagtcacaagggctgtagaatgcagtggctgtggcacaggatggggagggctaggttggctggggaacgatcgggcagggcttgaatgccaagttaagggaatctggtcagtagttcccaaatgaatttctgaatctctagggaaaaacagtaaaatacacacttccccagcctcacacaagacccgaagggcagccagcgcccgaggcgattccgagaatcagacaagtttgggaacctgctaagcgcaagcaaaacaaaaggtttccacgcaaatgagtgagatgtatcaactacgttttaaaatgcactccagtccgagagcagacaggaggccactgcaataatccagacgaggggcagtgaggcctgagaaatgggagataatcgccttcatctcgattcttggcgcccaccacgctgtcccgctcggtgggcctcccttaaggcacgcagctgatcggaacgcgctttcttacccgcctcatgcgaccgtttgacagcaggtcggcgatccccttggccgcgtcgtttttttcggccacacagaggactttccgcacgcctcggagggccatctccatggcggcgcgggaaaaggcacggtcttcgggccgtcgcagccaccggagcgcgtagcgggcgacaggaaagatcatcctcagacctcgcgcccggagccgctccccggctgccggcgcatcctggggaagccagagatgaggctcaaatggcgcccaccgaaagggaaccagagcctcgcttcggtcacgtccccaccagcctgctggcctttggagcttcagtcactgagcctttcccgtgccgcagccgccgcctcagcaccgaatccagtatcttggcgtggaacttccgcccgccttctccagctacttccgccaggcgcgcgccccacagcgacctggaactacaactcccagactgtcccgcgcccctcgtccaagcacgttcccctctgccaccttcccgccgcccccgtctcactccgcccctctttcccctccttcccggcagtggttggttaatcggactccttcttgcggggagccgccagacactcccatccaaggcctctttctcatgactttttaatctcctgctcggaagtctacgaggacgcttccgggtcacgcggcgcggacaccaggagtcatgtgatgtcaagatggcggcgccgcggtagcaggatccgggttgtggcgtcctaggagccgcgacggtttctgccctcgggcagtgaggggcagcagcgcttggctgacccctgcggcgtcccgtagcctcgcgttaagccttgttcagagcgggggcttttgctgtcgcagtgggttccggagagtgcaggtgatttcgcagcaggtttcttgtgctggccgcgctcgccggacgaagaagagaagggcagttgggcctgcggccttggcgttcatgaggcctcagagagctccggaggagctacaactgtgagggggctgctagagttcttctcctcgggtgtgtgagaagcagcctaggaccccgggttcggggagtcgcaaagaaggccgtaagggcttcacttccttctccggaggcctgccttctgcgcgtcgattaacaccgcattctttcccacttcctctcaatgttttcttcatatatctggaaatatgatcagcgcccctgacgtagtggccttcaccaaagaggaagagtatgaagaagagccttacaatgagccggccctgcctgaggagtactcggtgccgctcttccccttcgccagtcagggtgctaacccctggtcaaaactgtccggggccaagttttcgagggacttcattcttatttccgagttctctgagcaggtgggaccccaacccttactgaccatccccaatgacaccaaagtttttggcacttttgatctcaattacttctccctgcgtatcatgtctgtggattaccaggcttccttcgtgggccatcctcctggatctgcctaccccaagctgaacttcgtggaggactccaaggtggtgctgggagattctaaggagggcgcctttgcatacgtgcaccaccttaccctatacgacctggaggcccgtggcttcgtgaggccgttttgcatggcttatatctctgcagaccagcataaaatcatgcagcagttccaggagctttcagccgaattttccagagcttctgagtgcttgaagactggcaacaggaaggcatttgctggggaacttgaaaaaaagctgaaagacttggattacaccaggacagtgctacacacagaaacggagatccagaagaaagccaacgacaaaggcttttactcatctcaggcaattgagaaagccaatgaactggccagtgtggagaagtccatcattgaacatcaagacctgctgaagcagatccgctcataccctcatcggaagttgaaggggcatgatttgtgtcctggtgagatggagcacatccaggatcaggccagccaggcatccactacctctaaccctgatgagtctgccgacacagacctttacacctgcagaccagcctacaccccaaaacttatcaaagcaaagtccaccaagtgttttgacaagaagttgaagaccttggaggagctctgtgacactgaatatttcacccagaccctggctcagctcagccacattgaacacatgttcagaggagacctgtgttacctcctgaccagtcagattgatagagcacttctaaaacaacagcatataacaaactttctctttgaagactttgtggaggtcgatgacaggatggtggagaaacaagaaagcataccctctaagcccagtcaagacaggccgccttccagttctctagaagaatgcccaattcctaaagtgttaattagtgttggttcttacaagtccagtgtggagtctgtgttgatcaagatggagcaggaactgggagatgaggagtacaaggaagtggaagtgactgagttgagcagtttcgacccccaggaaaacttggactacctggatatggatatgaaagggagtatcagcagtggtgaaagtattgaagttttgggcacggagaaatccacctccgtgctttctaaatctgacagccaggcaagcctcacagtaccattgagcccccaggtggtccggagcaaagcagtcagccacaggaccatcagcgaggacagtattgaagtcctcagtacctgcccctctgaggccctcatccctgatgactttaaggccagctacccaagtgccattaatgaagaagaatcatatccagatggcaatgaaggagccatccgcttccaggcaagcatcagtcctccagaactgggtgagacagaggaaggcagcatagaaaacaccccatcacaaatagactcctcctgctgtattgggaaggagagcgatggtcagttggtgctgccctccactccagcccacacacactctgacgaggatggggtggtgagcagccccccacagcgccacaggcagaaggaccaggggttccgtgtagacttttcagtggaaaatgccaacccttcttcccgagacaacagttgtgaagggtttcccgcttatgagctggacccgagccacctgctggctagccgggacatcagtaagaccagcctggacaactactcagacaccaccagctacgtgagcagtgtagcgtccaccagctcagacaggatcccctctgcttatcctgctggcctgtcttccgataggcataaaaagagggctggccagaacgccttaaaattcatccgccagtacccctttgcccacccagccatctactccctgctcagtgggaggacacttgtggtcctgggggaagatgaggccatagtcaggaaactcgtgactgcactggctatctttgtccccagctatggctgctacgctaagcccgtgaaacattgggcctcctcccctttgcacattatggattttcagaagtggaagcttattggcttgcagaggtaactggttccaggtggtggggaagggccttggccagatagggatgaggtatattggtgtggtggagccagaatcaggaagcctggcttctagacagggcccagttcctaccactgtgttacttttggcaagtcatccccctctctggtttctatttccttgtctgtcatgtgagggggttgcagttcctaggtggttgccaatccccatctgtccccgagctgtgtcagcattattagggaaagtttttatttttatttttatttttttgcaacgaagtctcgctcttgtaccccaggctggagtgcaatggcgcgatcttggctcactgcaatctccgcctcccgggttcaagcaattctcttgcctcactgtcctgagtagctgggattacaggcgcctgccaccacacccggctaacttttctatttttagtagagacagggtttcaccatgttggccaggctggtctggaactcctgaccttaggtggtctgcccacctcagcctcccaaagtgctgggattacaggtgtgagccaccgtgcctggccggaaagtttttaaaatcatggattcctgagtcacaagccctcgaggttctgattcggttggtgtgaggtaagacatggaatttatctgtcgccattgccagcccgactgcagggagcatctctctataaaagcaaaaggcccatcagaagggacagatgactccgggggaaagggttaggctgctgtccctgtaagtgctctttcaaccttcagagcacgtgcagatgttgggtgctgggagcatctgcctccagcatcctacacaggcatgaggtgcagcgggcaggtgtggggagccctgcaccctggagggtcccctgcggggccaaacgggaatgggatgggctacagctcacccaaagaattcctgggggaggtgagcagtagacgccacctgagggtatgataagatgaaactgttgtgggctgtggcagttagcgggagcagtgggtggtctgggtcaagtcctggtgtgccaccactcgctgtctggattcggaccaaccatctcattcagtcacccaatcatgttgaacacctctgaagggctcccggggcccacctgagagccatcggaagggtccacgtttagtgcatgtccaaaaaaacacagcacagtgcagtgcttggccctgagaagcactcagagggtggaaccggcaccgacacaggcaggcagactggggcctacctgaggcccagctttaaaaatcacgagcaggagagatgtcttcggtggttgtgaccttcctatcctcggaggtgttgcgctgcagaggctctgcactctgagcaccacggcccagaagtgtgcctcctcactcaggcccactgctcacatgatggactctctttcaggactctcacctccgaacaccagtcttgctggcccttgatttttttcactctgcctggaaatgcttgtagttgggtcagccatctgtggggataagagatggctaaacaaccaagctggtatcctgtcatttgcgggtttttttgttttgtgtgttttttgttgttgttgttgttggagacagagtcttgctctgttgcccaggctggagtgcagtgatgtgatctcagcccactgcagcctctgcttcctaggctcaggttattctcgtgcctcagcctctccagtagctgggattataggcgtgcgccatcatgccaggctaatttttgtatctttagtagagacagggtttcaccatgttggccaggctggtctcaaatgatcggcccacctcagccttccgaagtactgggattataggcgtgagcccggccctgctgtcattttaagtgaacaccaggggtcatcctattgcttactaagcagcagtcacaagcccagaccgaaaagcagagcacagttctgcctggagaaagtgctagcctagcgtgtgtcagaggccctgggttgagtcctggcttgaccacttgctagctaggtgaccttgcacaagctgccgctttacccagtcctctgtgtcctcattggtggagaggtgtcctcctgcggcgggcatggtaagtgcaatgtgaggctgcagttggggtgccgtgcgcttgggggctggagagctgaggcttgtcccttcccgtgtcatctggcctcctgaggaggagctttatggaaacagaagtggaggaacagttagaatagccagcttcttccaaaagaagtgccaccattggggcaggtgtcagctgcatcaggggatgctgggcctgggaacaggtatcccagcagagacggaggggcaaaaaggtgggaggtgaggcctgggtgccctgtggcggcagcacctgtggagctggatgtgcggagcttgggaggtgtttgactctggccagccccactttagggaggtgagggtgaaggcgttagagagctgagaaggtcccggaacacaggggccatgcagcatgggttgaggagagcgtctcactgccctcatgagctttcttagctgtcagccacctgcaggccccagttcctccatgcctgtgggatgcatgtggtccatagcccagtgctgtccctatggtcaggatgcatgcagtatgcatggcctgtctcagctgtcccatctctgtgaccttgcttttgccgtggtctgccacaccctcctcagtccctagagcccacgctgcttctgagggccagctctgaggcaactccacgaatcccccaggtcttcccaactacagcctctcccagggagaatgagaccttgtctcccttcacttcactgtacttgtgcacatttctttttttctcaatcagactgagctcatgcaggacaagagttctaggtcattcttcattacagtgttagctcccaggtcaatgttgggatgttatagatgctctgtaaatgattgttaaatatacaagaagataaaacccaggaaggaaaaagtactgtgagagtaccttggtcccaagtcaccgtcagtccttcttacaccatacctgtctgacgtaaaccctaaatgtctgggccctacagggcagtccctgctgctctggggaagctgcttcaggagggtgtttaaggaaccgctcccctcactgagtgaacactggcttttcctggctctgatgtgccaggcattgggggcatgagaccagatcaggtgcagttctgggaccctagaatcttggagctgcttgtccagtggggagaagccaatgaacaaacagcagtcaccccactggtcagtgctaggctaaaagtagtgatggcgatgacagcagcgcctaccgagggccagcattgtcctaagcacaactcattttgtctccacagcgaccccatgagggatgtaatagtagtaactggcctgtacagtggctcatgcctgtaatcccaaatctttgggaggccaaggcaggaggatcacttgagctcagcagttcaagaccagcctgggaaacatagcaaacttccatctctacaaaaaattatctgggtgtggtggcatacgcctatagtaccaaatacttgggaggccaaggtgggaggattccttgagcccaggagatgaaggctgcagtgagtcatgatcgtgctactgcactccagcctgcgcaacagagcaagaccctgtctctaaataaataaaaacagtaggaatgttatctccatcttataggtgaggctcagagaggttaatgaatttggccaaggtcacagcaggaaagcaggagaggatcagggaaggctgaatatgctttaaattaagctaagtacaagagagagaggttatttcaggcagaaagaagaggtttttttgtttgttttgttttttaagacagagtctcgctctgttgcccaggctagagtgcagtggcacgattttggctcactgcaagctctgcctcctgggttcacagcattctcctgcctcagccgcccaagtagctgggactacaggcacctgccaccacacccggctaattttttgtatttttagtagagacagggtttcaccgtgttagccaggatggtctcgatctcctgacctcacgatgcgcctgcctcggcctcccaaagtgctgggattacaggtgtgagccattgcacctggcctgaacaaagaggtttgtaattctaaggccccactgaaagcttgccatggctccaaaaaagagtccattcagcaggaatcggaccacaaagggctttgtgggccacccagcgtgtttttgaccttggtcataagagtggtgaggagccctttgaagattacaatgatcagatttgtcttccaggaagagccagtgcatgctggctaggtggatgctggcctggggacaggaggcctcacctcccaagcttctgcctccactttcccggcccttgcccttcctcctgaccttggcctgtctgtttcagagtggcctcccctgccggtgccggtaccctccatgccctgagccgctacagccgctacacgagcatcctggaccttgacaacaaaaccctgcgctgccccctttacagaggcaccctggtgccccgcctggcagaccaccgcacacagatcaagcggggcagcacctactacctgcatgtccagagcatgctcacccagctctgctccaaggccttcctctacaccttctgccaccacctgcacctgcctacccacgacaaggagacagaggagctggtagccagccgccagatgagcttcctaaagctgaccctgggtctggtgaatgaggatgttagggtggtccagtacctggctgagctgctgaagctgcactacatgcaggaatctccagggaccagccaccccatgctcaggtttgactatgtccccagctttttgtataaaatctgaggtcggtcccagacactgtgaccaagacctgtgactcagggtatggggaggggaggggttggcatgaccaaacagttgcctgagctggactgtttaagtttctggtgtctggcagcatggttcccacgtggctcctagtagtttttaagttggacatgggcagaagtggagcctggctccctctaaaggcgtctggagggatggtgacagctacatttggctccctggtgaagagtggcccctggatatggagggggccttggttttctgaggactggcagccagggcagaagggaagccaccagtcccttggtggggcagggtgagggcaggaaggccaaagcctgatgggaggagcacactggctgtattcagcattgccggacacttgagtggcaaaatgaacgagggtgacagccaggtaactgttgtggtttggtggaaaacaggagggcagaacacccatcgcctccttcagacccagatgcagccctttatttgcttcctggagcccactgtcctaggggaggccctggaccagccagtgggggtgagaaaggctgccaccctctgggtcgtgggaaacatgcgaccttggcctcagggccacagagcgtgagcagcaccctgtccgctgtcctcgccacctttacctgggagagaagtgcctgtgagcgggccttgggactcactccccatactctttcaccaggaacgagcagagtgttcactagtcctagtgtgaagcgggcacaagtgaccaaagccaatggtgaggaccaccttgggggctggagagcacagcaggcagagcagggctgaggcgccatgaggccatcaccaccatgcaagggaggagcagccagcagctctcctgggtggcccactggctcctgccggccagagcgcatgagcactgaccttcctcgtggggaaggtctgcagacccgtgtgaacatggcagaggccacactccagctcccacccacataaacctttgcaaccacttcactacctctcactgggtctcgtgggcttgggacagcaacggttctgtttagtcagctggtgcaggtggttggcccagccgatgagaactcaaatagcacggatttcctggatgagctaccacgtggcgctcttcaggttctgcctctgggaggctgtgtgcacctcagtcaccacagctcacggccgtccccagttgagtcccccttctgaggacaagtttgaaactgggaaggagacaccccctggttccgccagcacctatcccactgatagtgatcccctggcctccccgagcctccttaggcaatggccactggtttgtagacagagagtttcttgcagccttgaaaattttattccctaagtggggacagctctggtattactgcttctttaatttgttccacaaaaattatgctgaaatggacctgaatcagccctgggtgtgcttctgttggcgcctgctgctgaggcccggcctgcccatcggcctgtagtacgccatcgaggtcatcatggagccagccagcttctcttctcatcaaggaggcagagacccctggtggaagccaagagtgaccgaagagggcttgcatcacgtcactccagtggttccctccttgtccaagtcctcgttttaagggcatggcccgttggctccagccgttggcttctgttcagggtccttgctcccatcagaggtgtttgattttgctcctggggctgcgatggagaaccttttgtggcagatggtgctgcctacatctcattggttctctgtacctgtgcccgttgcgcatgttcacagacaggagagtcgccagcaataccttggcagcctttaaatgtgaaacgtctgttacttgcgctggaggcagaggctgtgcagggagcctgcttctaatcgtgggctcccttatctgttacggttccctcccctcctgttctagatgctgattcgttttctcactggctggttaattgctgtctacttaggcctccaaggccataactgtgcaacattttatctgagaaggaaggaaggtcagaaagtgatcactggcaccaccactgtggcattcctgtcacaccaacacagaaattcacagctcatactgttctcacctgggaaacttgggaagggctgatgagtttggggcagatcctgaattgcagccacacttggccttctagaagctgaagttgtgccctcaagtggtcctaagtagaagtccacttgaggtatttgctggcacacaccctcaagggtggttcagaaggtcctgaaacctaaggcaaaaggctgctggggcatgaacagaacagaccgtctcaggggcagccatgtaagtggcaagcagggctggtctccctcaaggtggttcttcattaagtaaagatggcttcgtgactagtgtttagctcccagatttatatttgggttaaaaactaacttttcaatgtggcagtttcaaaggattacttgatgcaaagtatgtttcctttcaaagggatcttgacgtggtaccaggactgagtcatgatttgggcagaggcagttaacactgggaagccctgcccctccctatgcccccttcactccggggaactgaaacctactctgagtctcacatctctaaacctcagtgctgagacctatgcagtgggactaatctcatcaagaattttcagttgaggccgggcgcagtggctcacgcctgtaatcccaacactttgggaggccgaggtgggcggatcacctgaggtcaggagttggagaccagcctggccaacatggtgaaaccccatctctactaaaaatacaaagaaagttagccaggtctggtggtgcgtgcctgtaatcccacttactcgggaggctgaggcaggagaatcacttgaacccaggaggcagaggttacagtgagccgagatcgcgccactgcactccaccctgggcaacaagagcgaaaactgtctcaaaaaaaaaaaatttttcatttgaggtattcttccagtagaaggttagtaagtttttaatgaaaccattaaaaattacacttcccagaaaatagatgacatcagtgccccttgctactttctcagtcctcactattgctttgagggcccaggtactgaaactggttgtcttgagttttgtgtcagctttttctccagtccattatccccctcccttgcttctgaagcagtctaggttaaactagccaggcaggtagttgtggactggtgattttcaaaagccccactttagagatcaggccacagctttttatatcgcacaggacacatcagcctgagctgctgcctcatgcctgtttccccaggaacctcactcctttggtagaaccttgggattttagaaattgtggcttttccataactcatttactccaacagttgaagttacacacattgctcccaaatttggaaatagaccacagtaccttacctttcattccccatctggcctttaccttctttgcttcagtggttgaaaacagttgccatattcaaagtatagtagatttcaacctcacacaaatgacaagtcccattttacaatcctaggaaggcccaccaatttcatttcacgcgccagggcggctgcagttggaggccgagggcagccctctgctcactgaatgtcttgcatgtgctgactgctgcccgcagtgctgaacatgccccaccgcccaggcccagcactgcttgttgggtcagcatctagtgctgctgtcacatctttgtctgcacagccagtaggattgcctcagccagggggtttatcagaaggtgtgcaaggcctttgggggaactgagcccctatagtgggcagtctcctttaccttcccacctccctgaaaagcacagaagacagtgccttggtttgtgttttgaagcaaacaagtcagctttctggctttgccccaaaactgtgatggaacataataaaactggagatatggtttttaacactgcaaaaaggaaaaagcatcaagtttctacttctggctggaaagcaaaaccaatctcagctgacaaggctgggcaaactaagttttcctgagcccattttcctttgagccctgacctagcctggccttacctcattaaggtttggttaaagcagtggaaaggaggaggaggcaggggtggatgggggtgtggggaggggatgagcactctgcagccgattaatctgttggtaggggcccagcttcttgggagtgcttattcagcccaagagtggaggctgtttacagcgagccctggagatggcagcttgtctccagctggggaggggtcaggcccctaaattgaagaccactttggtagcagaactgtagggactggtgagtcaactcacagattctgcagcagctgctccacccacaataaagcaaacgccgacaggctagaccccagattgcaggggctgccacctacaaggtgggaccacaggctgcctcaccgggattgtctgccactaaatagctggagtcacagattgagataaatgccaccttcaaggttgcagtgaaaagcataatcctatgtgatgaatttatatgtgttattttttaaaaagctattttattactgcatgttcccgtcccgtcttgtgaatgtgagtccccgccaccacgtgaggtgcagtcgttgcagcggctggtgcaggagtgcagctggcgcgtgtgtgatagcatctcgtaggtgttgctgcacaagagttaaccagagtcaatgccaaacacatagtatgagaagtgtactttttaagaaattaatttatttgagttcaaatatttttgaaatataaaaattggttgtattttttaaagctataattcttgtagacattctgtggttaaaaatttgattgtgcttattaaaaatggtcatctatgttttgcacttcagctacgtgaaaataaaatttctttgggaaggtgacatttggcttcctgattacgggagggagttggttatctcaggtggagcaggaaagcctggttgattctcacaccaggatgggactgggacttcccaggatggagggaggaggccatttctacaccatactttgagctactgacagcaaaaccctcccaccatactgggtgcatcttgtttactcttgactaacatacacttctgatttacagcagaagcctcagaagctaattcagttctcctttggcatgccactggataacaagatagtgagggggcagtgtgtacaagctgtggacatgggcatttcctctctgttgcagcaaggcggaggaaagcccagggagagtaaaacgctacaatctttctaacagctttgccctacaccaccatctaaatgattatgaccaagtggcgacatagtattttattttcctagaattatgtccagctgtgagaaagccaggttcaaatttaaatcctttaataacctgtcccagaattactaacaatgagacttaaacaaattttgatttgtgaagaaaacatgaaaaaagtccaaaagaaaccccctcaaagggcccgagtgtcaacagttcccctttggagcagctcatccatctctcaggtgggggtcctccggcaggcagcttcctctgtggcgccaggtgggtccagagtgggcccgctcctttagaagtcaggcaggccaggcagagggaagagagaggcgaagctctcaacctcctcccggagagcctgcacggccgcctggtacttatcccctgccagtctctccttgaactctttcagggtggctctgacaccagtgtcgctctggatctgcagggtcagctctatccctgtgccacaagacacaaatgagtcaccccacactacacaccaaagggggtacaatggctgggggccgaggcacaaatgtcagaatgtcccccagctggggagtgtggcagggcacaaggtctccatgcttacctcaattactctgagatgcacccacccttggacagatgtcctgggcagcccaaatttataaccctctcagacaaggtgatttacatgtgttttttgctgtctcccaccccaacactcagccttggtgcagaattgtctttcagtggcagggtctcagctactcatcacaatcagaaactaaatacacacaataagatgtggcaacttccaaacttttatccttacctctgtgaataaagtgggctactttttggaagtctttttccaaaagtccacgggacgtcagtgctggggtccccagccgcagtccactgggccgcagagcgcttctgtcacctacaagataaacggggctctgtccctaagtcacattgtcaccactgtgatggtggtgcatttaaaaagggacatgtgggcaaaagagaactggcctgaggatactggctgtccctagcaaggagtacaactgattcagaaactaaagtagaacccaaggcacaaggaggcacaaccacgtttggccactctgacttaattactagtacacaaagtggtctgatgtgccccttgctcctaaaaatgagggtaacatctgtctgggtctgagatgcgtcatcaatattttgttaacaacccacagagaaatgcagcctctggattccggaggccctgacctccctcatctgatgaatgtaccacctccaacagctctacatcagtctttttgctccctggcagggtcagggccaagtacaaaggcacagccaagagacagccaaggtatggtccctgcccccgctccattttttgtttttgtttttgtttttttgagacggagtctcactgtcgcctaagctggagtgcagtggcgcagtctcggctcaatgcagcctctgcctcctgggttcaagcaattcttctgcctcagcctcctgagtagctgggaccgtggtgtgtgccaccacagcatttttagtagagacagggtttcaccgcgttagccttctcaatctcctgacctcgtgatccacccacctcggcctcccaaagtgctgggattacaggtgtgaaccactgcacctggcccagtttttttttttttagacagagtctcattctgttgctaaggctggagtgcagtggtacaatctccactcactgcaacctctgcctcccgggttcaagcgactcttctgcctcagccttccaagtagctgggattacgggcatgcaccaccatgcccagctaattcttctatttttagtagagacaggatttcaccattttggccaggctggtctcgaattcctgacctcaagtgatccgcctgcctcggcctcccaaagtgccgggattacaggcgtgagccaccgtgcccagcccccactacagtttttatgtgaggtctgtccccggagccaatatattcatcagctacaactttggccagaagaaatgcagatgggagaggagtgaaggagaaggcaaggatgattctcacctggacaggtgttcttgttgcaggcaatagaacaggcttctagcaccttctcagcccttccaccatctgtgcctttggaacggagatccacaaggatcaaatggttgtcagaaccacctggaaacaaagttggacatgtagaaatgcaggcgaattctatgccgtgaaggaatctctgagaaacgaaggcgaggatgaaggcagtcaaagcagatgaggtcaggaaggtgagcacccccaccacatggcctgggattctaatccccacgagagatgcccgtgcctaagaatgtgaaaggaaggacagagcacttttgaaaggggtaactgatcatacagcagagggcctgacactcccatggggaagggacagcttcctcaggctgctcctggcttgttttctctgacaagttgcttgggcaattccctaacattgatggtaaaggctcccctgaaggcagcatgaatattgggcagcagttcaatttactttggggggtaaggggcatgttcacagagcacattaggtgccagacactgtagcctgtggtaggtttttcccggatcctgtgaggctgatggtattatcaaagtggtaaggtgacaacagcaaggctaacagagttttctggacctggcccgaggtcatacaggaggatccttccactttgaaccttcattaagctggggtagtgccttgggtgctgacagcactggggcctctgcttctgagctgtgttgcggggatccctttcaagatgcgggtgagctagggctccagcttggctttgcagccccccagctgtgcccacccacttgccgtgtggctttaggcaggcagctcaacattgtgaaacctcagatgcccatttgtaacaaaaagaccaataattcacagggctgtcatgaagtttaagtaagatactggacatagtgcttctcatagcaccaggcaccaaagagggcatttgcaagcattatctgtctcagccatgtgcatcgggtcctcagatggcagagtgacaatgacacagtcaccagggagagggcaggcccatgccatgagatgcccatggtgacagggactatggcctaaaccctcacaactccaagggtggctcccagaccagcatcacccaaggcctggtcagaatctgcattgcaccaacagccccaggggtggtgtgcacattgaagtttaagaaacagggacctaaagcagtggtccccaacctttttggcaccaggaactggttatgtggaagacagttttttcacggatggcatcgggggatggttttgggatgaaacttccacctcagatcatcgggcattagattctcataaggatgcaggtataatcagaaggaaaaaaaagatagtttcttgaaagtgtctaggcccaacctagatccctcacatgtgcagttcaaaccagcgttcagctcctctgagaatctaatgctgccactgatctgacaggaggcggagctcaggtggcaatgctctcggcccagctcacttcctgctgtgcggccaggttcctaacagaccacaaaccagtactagtccgtggcccggaggttggggactcctgagctaaagcaccctgaagttcacagtctgcacgaggacttcttgagctttattatttgaagacatggaggatgaagggagaacagaaagtaagtgaagtagaacataaaagagggtacggctggtactgctgaggagacagcactggcccggccttcccaggcactgccgcacatgcaggattgggtgggagccccactccttagaccaggaggcctgtaatccctccccaatccttagatcagagggcctgtaatccctgtaaagggcaaaggacacggtgcagagagtgggcactcaggtctacacacagcaggacccatattcctggaccacaccactgctagcacaatcggcagtcttgtgggactaggtataaagtcgcccttcctccggaggactgagtatgctgcctgccaaaaaaatgcgttctccgtggaaagctgcagtgactgtgaggtggatggcaccccagagtggggccctgacctgggaagtccatctcattcacagcccatcagctccagaatgtacagatccaagcaaacatgcctaaagcaagccaactccccaggaatatgcaggaaactgggaggggagagcccctgcacccccagctcagcggggtgagagaagacactcccctggcacagtgcaaggcatcaccacacagtcctggtgccacctaccaggtgtgtgaccactacagcccaacctctcagttgagcctcaggtcatcctcctgcaaagctgttctgaggacaagcagtccttatgctggtgaccaatggcaaccactattcccatcatctgtggctcacccaagggggcggctggctggtctgaggcagggggaggctttccagttggaggcgaggctgacctcctcccaaggtgggcccatcattgcagctgcagcagcagagcctgggccacatcctggttgcacaaactgagaagcaagccttaatacaaccacaagaacaggcctgctgaacaccatctgtgtctctacctgtgactattttgtagcccagctccgtcagggcctcagacagagccctgcagttggccaccacctggtgttgataaactttaaattccagagtcatagcttgcttcagtgccacagcaacccctggacaagaagagacaatgggtcaggaggctaggatagaatcatacacagatgatgagtcaaacaacattcctgtttttactcaagcttccttgcttttcaatgtcaccccttgcttttgcgttggattatcttttcctccaaaatgatatatttttaaaaattttttattatttattatttttattttttttgagatggagtttcactcttgttgcccaggctggagtgcagtggtgtgatctcggttcactgcaacctctgcctcccaggttcaagtgattcttctgcttcggcatcccgaacagctgggactacaggcacatgccaccatgtccagctaatttttgttggtatttttagtagagacagggtttcactatattggccaggctggtcttgaactcctgacctcaagtgatccgcctgccttggcctccccaagtgctgggattacaggcatgagcaccatgcccagctaaaaaaattttttatttttatattttttgagacagggtctcactcccattgcccaggctggagtacagtggcgtgatcacagttcactgcagccttgatgttcagggctcagatgatcctcccatctcagtctcccgagtaggtgggactacaggtgcatcctaccacacctggctaattttttttgagagatggagtctcgctctgtcgctgaggctggagtgcagtggtgcaatctcggctcactgcaacctccgcctcccgggttcaagcaattctcctgcctcagcttcccaagtagctgggactacaggcacgtgccaccacatccagctaatttttgtattttttagtagagacagggtttcactgtatgttggccaggctgttctggaactcctgacctcaagtgatctgtccatctcggcctcccaaagtgctgggactacaggcgtgagccactgcgcctggccacgcctggctaattttttatgtttttggtaagagacgggctttcttcatgttggccaggctggtctcaaactcctgggctcaagtgacccacccacctcagcctcccaaagtgctgggattataggcatgagccaccgcgcccagctgatatgcttctctctgaggaactgctgttgaggtaacctttccctaagcatggaagttctgtgctaacattaccataccaaagctgttaagcaagatggattttacatcctttttaatcttgatgtgtgaaaacgattacttagcaggcctaagagccgatgctctgatgccagattatgcagctctctaaggtcagagcgcaggtaggaggtgcagccttcgtcctaccctgcaccattcagacttatctggtatctcacattcaatcctgagggctgcttcaagggacacagagaatggaggataaggagaacccacgggcctgcatcccgcacagagcctccaatcaatacttgtgaaaacaactggaaagggcgtccagagcagctggggatggggtgatccctgcatcccagagttaaagcagctgtgggtgccaagtgtgtaggtgtgatgggagaacatgagaacacacccgggaccccagctccttccaccccttatgcctaatatctcccaatcgctgctgtccccaggttcctctctagaagtgcttgtgcgtctcctgagaagctacaccttcatcctgagccccttagcgggaatgagtgctaccaatgtccttgttccatgaaggcagcgggataactcttgagtcatcacaaatgtcctaagctacttgtacaaagagacaaagagcaagtcaatgagaacctgctgggcaggcatggaatctgactcaggagtcactggcgtggcactggtgcagggtgtgaggatcagacacagggtcctccactgccacaggccaggcccatcaagggcaaggggactcatcctgcagggtctggaccccaatctctctcacctgtgctttgccctctcctaactgtcagattccttccctaagagggtgccatgtactttacaaaactcggcctgacccacaggtttgcctctgggtggccgtacacgtggagtggatgccattccctactgtccctaccttaggccagtctcaaccatgccctactctgtgttagcatctcctgcacagagacagccctccagctttttccccagcgtggaagtcctggcacacgattttggaggacaggtgggatgggaattaggggctacaggatgagcagaggcagatgatgttttaccagcaatggcgtggttgtggggacctccctgcaggccagggaacacagcagaattgataagagactccaggttgtacagaatctctttgccagtcttgggatccacacttttcactcctggaggaagaaaaacatcacagtgggatcataggggctgtcccctctttttctttttaggctcaaacccagactggccagggaagaatcaagcacaagcctggcctttatcctggcatggagaactgatttgtaacacagcggagcagaggggacccttgcctcctgagggcagaccagtatctttattttttggaaaccaacacatcatggatgactctggctggaatactggtttcagcacctcacctgtccacctgcctcctctgatggcatctcttcttaacacaactagaacaaggccttaaaaatgaaaggacaggctggacgcggtggctcacacctgtaatcccagcactttgggaggccaaggcgggcggatcacgaggtcaggagtttgggactagtctggccaacatggtgaaaccccgtctctactaaaaatacaaaaattagccgggcgtggtggtgtgcacctgtagtcccagctacttgggaggctgaggcagaagaatcgcttgaacccgggaggcagaggttgcagtgagccaagatcgcgccagtgcactccagcctgggtgacagagtgacattctgtctcaaaaagaaaaaaagaaaaaaaaaggacagaaatttccctccactaacattgtaaccaagaattcaagaatttgccctggacatctttccttaaagaaatgtccatgtggctgggcgtggtggttcatgcgtgtaatcccagcactttgggaggctgaggcaggtggatcaattaaggtcaggagttcaagaccagctgggtcaacatagtgaaaccctgtctctactaataatacaaaaattagctgggcatggtggcgggcatctgtaattccagctactcaggaggctgaagcaggagaatgcgttgaacccgggaggtggaggttgtagcgagccgagattgcaccactgcactccagcctgggcgacaagagcaaaactccatctccggggaaaaaaaaagtccatgtaatcccagcactttgggaggcagaggtgggaggatcacttgaacccaggagttcaagaccagcatgagcaacaaagagagaacccatgtccacagaaaaatttaaaaattagccaggcatggtggcgcatacctgtggtcccagctacgtgggagggtgaggtaggaggattgcttgggcccgggaagttgaagttgcagtgagctttgattgcaccactgcactgcagcctgagtgacagagtgagaccctgtccccaaaaataaaatttaaagagtctccaagatgcattgaaagagacaacgctcatgtggctaatatgaagaataaggttcctttctgagaaaaagttaaccatcaataatagctactattcagtcataatcggtaacatctatctagagcttctagtgagccaagaactgctctaatcactttacataaattcatttaatcctcaaaacagcagtccaaagggacaggtactattattatagtccccactctagaggtgaggaaatgaggaacagagaggctgcacagctagccctaaagtcatacagcgggtgtgcggcagagctagtacttgctctgataggctggctccggagtccctcagcactgggtgaaataaatcacatcaacacacagtgggggaaaaaaccaaatgtctcctgggcgggtgggaatggctacctgcctcagaaacatcagcacagctaaaaacggtccttggaggagcacagaggcaacggggtgctgagaagctgagggggcatgtggctgtgtctagtcccagccaggggctgggcaagaagaccctgcctcgggtaagagtaatgtagtcgaacagccctctccctctccctccccctccccctccctctccccacggtctccctctccctttccacggtctccctctgatgccgagccgaagctggactgtactgccgccatctcggctcactgcaacctccctgcctgattctcctgcctcagcctgccgagtgcctgggattgcaggcacgtgccgccacgcctgactggttttcgtatttttttggtggagacggggttttgctgtgttggccgggctggtctccagctcctaaccgcgagtcatctgccagcctcggcctcccgaggtgccgggattgcagacggagtctcgttcactcagtgctcaatgttgcccaggctggagtgcagtggtgtgatctcggctcgctacaacctccacctcccagccgcctgccttggcctcccaaagtgccgagattgcagcctctgcctggccgccaccccgtctgggaagtgaggagcgtctctgcctggccgctcatcatctgggatgtgaggagcccctctgcctggctgcccagtctgggaagtgaggagcgcctcttcccggccgccatcccgtctaggaagtgaggagcgtctctgcccggccgcccatcatctgagatgtggggagcgcctctgccccgccgccccgtctgggatgtgaggagcacctctgcccggctgcaaccccgtctgggaggtgaggagggtctctgcccggctgccccatctgagaagtgaggagcccctccgcctggcagtcgccccgtctgggaagtgaggagcatctctgcccggcagctgccctgtccggcaggttgggggcagcccccgcccagccagccgccccgtccgggagggaggtggggggcagcccccgcctggccgtcaccccttccaggaggtgggggggcgcctctgcccggccgccccttctgggaagtgaggagcccctctgcccggccgccccttctgggaagtgaggagcccctctgcccagccgccaccccgtctgggaggtgtacccaacagctcattgagaacaggccatgatgacgatggcggttttgtcgaatagaaaagggggaaatgtggggaaaagatagagaaatcagattgttgctgtgtctgtgtagaaagaagtagacataggagattccattttgttctgtactaagaaaaattcttctgttaatctataaccttacccccaaccccgtgctctctgaaacatgtgctgtgtccactcagggttaaatggattaagggtggtgcaagatgtgctttgttaaacagatgcttgaaggcggcatgctcattaagagtcatcaccactccctaatctcaagtacccagggacacaaacactgcggaaagccgcagggtcctctgcctaggaaaaccagagacccttgttcacttgtttatctgctgaccttccctccactattgtcctatgaccctgccaaatccccctccacgagaaacacccaagaatgatcaataaatactaaaaaaaaaaaaaaaaaaaaaaaaaaaaaagagtaatgtagtcaccagagggctggtgtctctgctgatgcaaagttggcgcatcaggtctcaccacaggctaaatgatgacctgaccactaacaggctttcccaggtatgggaattcgaaaataaggggagtgcctaggggtaggttatgaggtaatggaaagaaaaaccttcactaaaatgatattaatgtttatacatccatgtcttctagtttgactactatgagtctttctctttgagaaacatgatggatcactgtaagttcaccagaataatgcagccttgtgaggcctcccagtggcccccagccagccatgcaccctcctttcattcaaacacctgcctctcgagttcagcaaccggcgccatcctaacacatagtggttgctgatccccctcctatgttcctaggacctggatgcacaaaagtgaagcaggagctgtggctgacagtctccttctggggattcctttctttctttctttttttttttttgagacggcatctcgctctgtcgcccaggctggagtacagtggcacaatctcagctcactgcaagctccacctcccaggctcacgccattctcctgccttcgcctcctgagtagctgggactacaggtgcccaccaccacactcggctaatttttcgtgtttttagtagagacggggtttcaccgtgttagccaggatggtcttgatctcctgacctcgtgatctgcccgcttcggcctcccaaagtgctgggattacaggcgcgagccacctcacctggccgggaatcctttctgtaaagcctgtcactgctccttcctaagcagctctttaagggactgggatcttaatattttccaaggatcccaggtcagagtttttcccagctccctcaactgaatctgaacccccacaggagaaatgtaaaccatggtacccatctgtacccaacattcgggagctcacctttcctgtagaagatcatgccagctcggcagcctcgcagggtcttgtgagtggtggtggtcaccacatggcagtgttcaaatggggagggcaccacgccagccgccaccagcccgctgatgtgagccatgtccgccatgagatacgccccgttctcatctgcaatcttccgtagccgggcatattccaggtttcgggagtagcagctggttcctgagacaggaaaggtgacacagctgcatcagagatgtccaccggccagctgagttggcttcacagtggcctctagatgtgcagatctgaaagcccagagatttcttcccttaaagtctcagagcaaaaatggagaatgccctcaaaaagcacctctgtgctaaaggcaaccactctaactcttcaacgtcttggtggttgagatggccccaactactattgccagcgcagtcagggcctgacatttctagatgcttctctgagaacagtctcacatcttaatctacatagcacaaaaagcagcaaacacacatctgtatcctgaaagaaactaatatatgtagaccccagaaactcagttatccagggcagaaactagcagtgggctcaacagggtgcgaacatctttccatcctcattctgtaagaggcaccaggctactggtgaacaaggtgactttccgccccgcgcatcacctgcgatgatcagcttcgggtggaagaggcgtgcgttctcctccagctggtcatagttgatgtagccagtatctgggttcacctgtggaatgtcagggaggcaggttcaggctgcttcctccaaccacacctgcctcctgtcctcccacttgaactggctccacccaccatgacaagaggaatgatgtcctagatgaggacttgagggtgagacaggatggatactggtgtgttcagcctgctcaaccaagtatggctcacagacccaggagtccctgaggagtcccagggttgtagtgagccctgctgctggggcactacctgctgagaaggaaccaaaaagcacctgcagaatgaaacaaatgtgacgggaccacacaatggaaaccaaaatggttaccttcaggaacaagaccaaaatgcctgctaatactacttctattccaagtataatgaggcaagaaaaagaaacaaaaggcataacgattaggaaagaagaaatttaaaaactgacattacacacagacaacacaatatacctagaaaatcaagatgctaggggccaactgttagaataagcaaatttagcaaggtcactggatacaacattgaaaaacaagaagtaggggctgggcgcggtggctcacacctgtaatcccagcactttgggaggctgagacgggcagatcatgaggtcaggagatcgagaccatcctggctaacacggtgaaaccccgtctctactaaaaatgcaaaaaattagccagatatggtggcgggcgcctgtaatcccagctacttgggaggctgaggcaggagaatggcgtgaacccgggaggtggagcttgcagtgagccgagattgtgccactgcactccagcactccagcctgggcaacagagcgagactccatctgaaaaaaaaaaaaaaaaaaagccaaaaagtatataaaagcaagaaagatagaaaatgaaatgtaaataacaaaaaccataaaaggaaaatcataccaaacctttacacaaaacatcattgcgttgtgtattttgtgtcacaaaatgcttgacaaattatagtaattaaggcagcacgcattcatggaagggcagagcatctggcttaaccagaagcagaaccacacacaacacaggtcattggatccatgccagtggtgacgctgcagtgcagtggggagaggatgaccttttcaatcaatggcactaggtcaactgggcatccatttggacaaaaatgttatctggatgcccgcctcacccacacaaatcaattccatattcagcaatcccacttgtgaatctatatcttaagaacttgaaatcagtatgtcaaagagacatgtgcactcccatgttcactgcagcactattcacaatagccaagttatggaataaagccatgtccatcaacagatgaatggacaaaggaaatgtgacacatatatatataaacaatgtaataataatcagtctgaaaaaagaaattctgtcatttgcaacaacaccgatgaacttggaggaccttatgctaagtgaaatacgccaggctcagacagacaaatactgcatgatctcacttcttttttgagacagagtctcactctgtcacccaggctggagtgcggtggtgccatctcggctcattgcaacctctacctcccaggctcaagcgattctcccactcagcctgctgaatagctgggaccacaggcagtgccaccacacccggctaattcttatatttttgtagagatggggtttcaccatgttgcccaggctggtctcgaactcctggactcaagtgagcctcctacctcgacctcccaaagtgctgagattataggtgtgagccaccgcacctggccatgtgatcttacttctatgtgaaatctaaaacaatcgaactgctgggcgtggtggcttatgcctgcagttccagcactttgggaggccgaggcaggtggaccacctgaggacaggagtttgagaccagcctggccaacatggtgaaaccccgtctctactaaacattcacaaattagccaggcgtggtggcgtatgcctgtaatcccagctattcgggaggctgaggcaggagaatcacttgaacccaggaggcggaggttgcagtgagtcaagatggtgccactgcactccagcctgggcgacaaagtgagactctgtctcaaaaaaaaaaaattaaaattgaataaataaataaataaataaaacaatcaaactcacagaagcagggtagaatgtggttaccagtcactggagggtggcagacaatggagagatactgagcaaagggtacaaagttgcagttagacaggaagaaaaataataaatatttaaggagtgggatatgttagttaacttgattcaatagttccacactgtatatacaaatcataacatcactgtgcatcccataattatatataatttgtttaaaaaaaaaagtcaattccaaacagattgtagatctcgatgtaaaatttaaaataatttttcttttctggcaacacatctcttaggaagttcattttattaaacttctataaacatatgggtcagccaggcgtggtggctcacatctgtaatctcagcactttgggaggccgagggggtcagatcacctgaggtcaggagtttgagaccagcctagccaacatggtgaaaccccacctctactaaaaacacaaaattagccaggcatggtggtacacacctgcagtcctagcgattcaggaagctgagggaggagaatcgcttaaacccgggaggcagaggttgcagtaagctgagatcgtgccactgcactccagcctgggcgacaagagggaaactttgtctcaaaaaaaaaaaaaaaaaaaaaaaggggtcagccggatgcggtggctcatgcctgtaataccagcactttgggaggctgagttggacagatcacttgagcccaggagttcaagaccagcctgggcaacatggcaaaaccttgtctccacaaaaaatacaaaaattagccaggcatggtggcatgcgcctctagtcccagctacttgggaggctgaagaggaaagatcgcttgagcccaggaggcagaggttgcagtgagccgagacagagccactgcactccagcctgggaggcagagccagatactgtcttaaaaaaaaaaaaaaaaaaaaagtcatgggtaagcacacataaccagcagagcatagagcgcaccacaggaaaaactgggctctgggatctgagaagcctcagggaagaggagatgtgcagagaggctccctgttctgaaggccctgacccaaccttccttcctcttaccttggtgtccccctcagaaactaccagcacatctggagtgaaaggtttcaggattggtggtcactctttccaaataaaaaaaggcagttataatccaacccaactatagaagcttgccacaaggtttcgggaaccaagacctcatctagaaagtcaagctgaaagatgatttgtggttttgtttgctgtgttttgcttcaggggtgtggttctttctcagtcacctgaatttggcaaagaaaccgttttatgaaatgaaatatcaacagctgacctccagtaaaaatggacgtaattcaccgggcatggtggctcacgcctgtaatcccagctcttagggagacagaggcagtaggatagcttgagtccaggagtttgagacccgcctgggcaacatagtgagatcttgttctccacaaaaaggaaaaaaaaaaagatttaaaaaaaatggacataattctaaaattttttgtgtagccacaattaccggaaaaaaaaaaaaaaaaaaaaaagcctgtgctgctttctccctttttaatttaatgggtttttcaaaggtttttcttttctttttttaatcttgaaaatgagacaagagaacaactcctagaagaattcataggcatttataataaactgcagatggggtccacagtgcacagaggataaggaaggagaccccagcagtcacttaggaccagggacagggaggaattctcgagtcacagtggggatgggccaaaaacacaaaatagaaggttaatgttgctgttgctctagcctggccctgcgtggggctcttgcagtggagtggggcaggggctgaaggtggaggcaggcggtctggtgaaggctgggcagggcagtggccctgggacaccccctaacctccaactctgcagcccggtggggtggaggtgagctgcctctggctgctgatgaatgccaataaggtctgtctcctcctcctgtccgccaagggcaggactcaaatcacccccacagcgggtgagctgcacctcctgctgcccaagctggccagggtcccaggccccacctctccatgcccatcctgaggtgggtcccctcactgcacccacaggactgcagcctgcacaatgtacatcaaagacgggggtggctggagggaactgggtgcgggacgcagattctttctttttttttctggagatggagtcttgctctgtcacctaggctggagtgcactggtgcaatcttggctcactgcaacctccgcctcccaggttcaagtggttctcctgcctcagcctcctgagtagctgggattacaggtgcccgccaccacgtccagttaatttctgtatttttagtagagaaggctttcaccatgttggccaggctggtctcgaactcctgacctcggatgatccgcccacttcgacctcccaaagtgctgggattacaggagtgcaccaccatgtatttttagtagagacggggtttcactgtgttggccaggctggtcttgaactcctgacctcatgatccgcctgcctcagcctcccaaagtgctgggattacaagcgtgagcaactgcaccctgcctttcttatttatttattttttttgagatggagtttcactcttgtcgcccactctggagtgcaatggagcaatcttggctcactgcaacctccgcctcccaggttcaagcaattatccctcctcagcctcctgagtagctggaactacgggtgtgcaccaccacacctgaggaattttttgtatttttagtagagacagggtttgaacatgttggccaggctggtctcgaactcctgacctcaggtgatctgcccacctcagcttcccaaagtgctgtgattacaggtgtgagccaccgagcccagccaagacaaactattttgttactattgtgacatgtttcaaaatctagcttcaaggctggccttggccaatgaggagatctgtgactgcaaacacctaggtgttctgtgaaaagaaatgactgcaaaaaagagcacacgtgcaatcaccagcactgagacaaaggctgagtacacacagaaccatggacagcatgcacccaagaccatgcaatgccagccaagcagaaggatgcagtgctaccttttttcatggtaacaaacatgaaactaagcaggaatggcacatttattaataaagaacatgaaaagatggttccgggacactagaaagaatcaccaacactggacactaaaagaaaaagcaagttacctcttcttcccattatccttcgtttttatagataaatcaccatgcctgaataagcccacacatcttacaggcattttttgacccaactgtttatacagacgggtcccacgaaaaacaagtatttgcctggggccctgcacaccctagaggcagcacttggcactggttctgatggtgttggttccactgctgggctggctgcgttatcaggtatgtgcagtggggtggcaatggcaatggggtgtacacctgagccatacaggtgctcctcaacttatggggttacattccaataagctcatcattaagctgaaaatatcataaagtcaaaaatgcatgtaatatacctaacctaccaaacatcacaacctagtctggcctaccttaaacatgctgaggacactgtggtaccctccactgggcaagatagtcaaacacaaaccttattttataatacggtgttgactatctcatgtaatctactgaatactgtactgaaactgaaaagcagaatggtcgtatggggggcttgaagtacagctaataacgcatgtcacttttgcactatcctaaagttgaacgccctaagtcaaaccactgtctgttcctctgtagccactatacacaggcaggggctagccctaacgtggccatggaggactgtggctgtggatggtgccgggctgctggttttggtgctggagctggggacgttgccatgcctgtagctactgcatccttgtgctgctgctggcccacaggggctccgagcagagatgtcaccaggcgagggcagagctgcagaggtggtggctgttgctggggtccaactgtagtgacctggttgctattccccagggttgctattccaagcagttgccactgcccctgccacatctgaactctcctcagtagttgcctccctcactggtttccctgtggcctcagctcagaccctcgtctctccatcccagctgccccagcgggtcctgaaaacctgaggagtccccgctgcaaggaaattaaaaacggtgcgaggtggggacttcctgtagtgacacataaaccaaacttacccctgcaggcacagccaagcatcagaggtttcccaaggaaataaaagctaggagagaaacacatgcttaccttgtagggcatagattcaaagaagatggacgtggcagagattttcttcttgtctgtcatgaacccatgggtcaggtggcccccatccggaaggtccaggcccatgatgcgcccatggggttccaccagggcagtgtacacagcaaagtttgcaggggagcctgaaacgagtggaccagaggagacatgattatttctaactgaggtaccaagtggcatccgggaccttggccactaagccttcacccaggagtggcgagaacaggccttgtaccttccctgagctccaggaggtgccccttcaccaccagccttgagaggtgaagttcagagagagggcactgcctgggagggggtatagagctgggagcccaagggtaatgcagagggatgcgtgacttatcttttatttatggcagttttttttttttttttttttgagatggagtttcgctcttgttgcccaggctggaatgcaatggcgccatctcggcagctcactgcaacctccgcctcccaggttcaagcaattctcctgcctcaggctccgagtagctgggattacaggcatgtgccactacacccagctaatttttgtatttttagtggagaccgggtttctccatgttggtcaggctggtcttgaactgccggcctcaggtggtctgcctgcctccgcctcccaaagtgctgggattacaggcgtgagccactgggcccggcctatggcagtccatggcagtccatcttaggactcttcttggtgcatgtcggccctgggggatgcacatgaagaggctgcaccaggccatatggatgagacaagcacctgagtagggctggacgttgaccccccagcactgtgggtccagcttataggcctgcagggctcgcttctgacagagggtctccagttcatcaataaactcagtcccgccatagtatctgtgggagaagagcaggagacttagatccactcagacccagaaagtctgtgcttcacagaggccaaagaagcttaggggtgggacagtgaaactaaagtggagagaagtaatgagaagagcttgttaacatgcagatgctgaagccagcatgatcaagtgttccaccaatgcctctggaatctacagtcaagagaccaaaccagctgtgcaacttggagcaaatatctcatctataaaaagagggggttttggctgggagaggtggcttatacctataatcccagcactttgaggagccaaggcaggaggattgcttgagcccaggagttcgagaccagcctgggcaatacagcaatatccccatctctacaaaaaatttcaaaaaattagccaggtgttgtggtgtgtgcccatagtcccagctacttgggaggctgagaagggaagattcactttggcccaggaggtaaaggctgcagtgagctgtgatcacgccactggactccagcctggaccctgtctcaaaaaaaaaaaagaaaagaaaaagaaaaaaaaaaggaaagaaatcctatcacatgctattaatacaacagggatgagcctgagaacattatgctaagtgaaacaaaccagtcaccacaagacaagcactgtatgattcaacttttatgaggtccctaaagtagtcaagcttaggctgggcatggtggctcacgcctgtaatcccagcactttgggaggccgaggtgggcagatcacctgaggtcaggagttccagaccagcctggccaatatggtgaaaccccgtctctactaaaaatacaaaaattagccgggagtggtggcgggtgactgtaatcccagctgctcgggaggctgaggcaggagaatctcttgaacccaggaggtggaggttgcagtgagccgagatcgccccactgcactccagcctgggcatcccagcaagactcagtctcaaaaaaaaatttaaagtaactacatgcagtggctcatgtctgtaatctcagagatttggaaggctgaggtgggagaactgcttgaggccaggagttcaagaccagctaggcaacatagtgagatctcagctctacaaaaaattttacaaatgagctaagtatagtggcttgcacctatagtcctagttacttggaaggctgaggtgggaggatcacttgaacccaggagttggagattgcagtgagctttgattgtaccactgcactacagctggagcaacacagtgagaccctaactctaaaaaaaataaataggccgggcccggcgtagtggctcacatttgtaatctcagcactttgggaggccgaagtgggcggatcacctgacgtcaggagttcgagaccagcctgaccaacatggagaaaccccatctctcctaaaaatacaaaattagccaggcgtggtggtgcacgcctgtattcccagctattgaggaggctgaggtaggagaattgcttgaacctgggaggcggaggttgcggtgagccgagattgtaccattgcactccaccctgggcaacaagagcaaaactctgtctcaaaaaaataaaaatagataaaaaataggccgggcacggtggctcacgcctgtaatcccagcactttcggaggccgaggcgggcggatcacgaggtcaggagatggagaccatcctggctaacatggtgaaaccccgtctctactaaaaaatatataaaaaattagccgggtgtggtggcgggcgcctgtagtcccagctactcgggaggctgaggcaggagaatggcgtgaacccgggaggtggagcttgtagtgagccgagatcgtgccactgcgctccagcctgggcgacagagtgagactccgtctcaaaataaataaataaataaataaaaaataaataggccagatgtggttgttcacacctgtaatcctagtaatatggaaggctcaggtgggaagactgcttgaggccaggagtttgaaaccagcctgggcaacacagcaagacctcatgtctattaaaaattagcctggtgtggtggcacgcacctgtggtcctagctacagagaggctgaggcaggaggattgcttgagcccaagagtttgaggctgcaatgagacgagattgcaccactgcactccagcctgggcaagacaacgagaccttgtcattcatttattcacacatacataacattttgttttaaacccagaactttgtttttaggtttgtatcaagcaaagtcattaacgttaggtcaacactgttttcttttttttttttctgagatggagtcttgctctgtctcccaggctggagtgcagtggtgcgatctcggctcactgcaacctccgcctcccaagttcaagcgattctcctacctcagcctccagagtagctgggattacaggcacgcacctccacacccagctaatttttgtatttttagtagagacagggtttcgacatgttggccaggctggtctcaaactcctgacctcaggtgatccacctgcctcagcctcccgaagtgctgggattacaggtgtgaaccaccacgccttgcctattgttttcaaatattgcctttgattttaaataatgttccaaaggtagattaatattaaattatattaacaaaatataatgaaaacatgtaataattaccttttatttttatttttattatttttttgagacggaatctcactgtcacccaggctggagtgcagtggcgcgatctcggctcactgcaaactccacctcccaggttcacaccattctcctgccttagcctcccgagtagctgggactacaggcgccagccaccacacctggctaatttttttgtatttttttttagtagagatggggtttacaccgtattagccaggatggtctcgatctcctgacctcatgatccacccagctcggcctcctaaagtgctggaattacaggcatgagccaccacgcccagccaataattaccttttaaaagagccctttaattggctgggcacagtggctcacgcctgtaatcccaacactttgggagacagaggcaggcggatcatgaggtcaggagatcgagaccagcctggctaacacggtgaaaccccgtctctactaaaaatacaaaaaataaataaataaataagttagtcgggtgtggtggcacgtgcctatagtcccagctacttgggaggctgaggcaagagaatcgcttgaacctgggaggtggaggctgcagtgagccgagattgtgccactgcactccagcctcgtgacagagcgatactccgtgtaaaaaaaaaacaacaagccctttaacatgaataaacgatgtaattacacttctatttaagttgtggtttttcggggttttttttaaatttagaaacagggtctcattctgtcaccccagctggagtgcattggcaaaatcatagctcactgcagcctttgatctcctgggctcaagcgatactccacctcagtttcttgagtagctgagactacaggcgcatgccaccatgtccggctaatttttaaattttgttttggagacagcgtctcactatattgcccaggctggtctcaaattcctagcctcaaatgatcctctgccctggcctcttaaagcactgggattacaggggtgagccactacactcagtccccttctttttttttttttttgagacggaggctcgctatcgcccaggctagagtgcagtggcgcgatctcggctcactgcaagctctgccccctggggttcacgccattctcctgcatcagcctcccacgtagctgggactacaggcgcccgccaccttgccaggctaattttttgtatttttagtagagacggggtttcaccgtgttagccaggatggtctcgatctcctgacctcgtgatccgcccgcctgggcctcccaaagtgctgggattacaggcgtgagccaccgcgcccggtcccccttcttaaaaatgtagaaaacatcaccccttgctcgatacattgctgtgagaatcgaatgaaatattagttttgaaaacacctggtgtggaccgggtgcagtggctcacagctctaatcctaagcactctgggaggccaaggcaggtggattgcttgagctcaggagatggagatcagcctgggcaacaacagcctgggtgaaactctgtctctacaaaaaattagctgggtgtggtggtgtgtgcctgtagtcccagcgactcagtaggctgaggtgggaggatggcttgggtccaggagaccaaggctgcagtgaaccttgatcacaccactgcacttcagcctgggtgagagaaagaccatgtctcaaaaaagaagaaaaaaaaaaagaaaacacctggtgttaacaaaataccttagcctgaaagaagaaagaaaggaaggaaaaagaaaaagaaaggagagagagaaataaagaaaacacctggtgaattctttaaggcacaatgcaaaagttagttattcacaataggagaaagacaatgccttcaacttgattctcagtcttctacatagagcttcaggggcatctcaggacagaatggcaattccttctccaagggtgacctttctgtttcctttgggacaaaaatgcacacatttgcaaaagccatgtctaattctgtaatttattttctttgcctgatgatgactgtaaaaaacaaaaacgaatataacactgtaattctgagggtgaaagagtcaactgaaagccactgcatgtgtaaatccaacatttataatgcagaaacggttttcagtaatccagattcagcctccacttccacaccattcccaatacagactcgatgactcacatggcaacggccaccttctgcagcatccctcagatgacactgaccttttctagacagaggccacacaccagtccagtggctcaatactccttacaaactggcctgtttttctagaaagcccccaaagaactgtgaaatgtgcccctgagtacacctgcgctgagctcttcagtgttatcacatgctgggaataaaagagttctgtcagagagcaggcgtggaacagaaatcctacagctgggaagcttattgttttctgaaatttccaaattgtttaggtcctaggctgactgagtactccctatgactgtgtcagaaccaggcctttgaagatattcacatacctctggcccgggtacccctcagagtatttgttatttaagcaagagcctagggcctccaaaactgctcggctggcgaaattctccgaggcaatcagctccaatccaaccctctgccggttactctccttcttaatgatgttgtaaaccttatgagaagaaaacagatgcttgatatttggaaattttagtttaaaattttgctctgatccaaattacaacctcctaaagagaaaagacactctttcacattatggaatagaatgaatcctcctcaaaggttttagtatctgagaaagcactaatcaatgaattaacaaaaacaaaatgatagccaggtgcggtggctcacgactgtaatcccagcactttgggaggccgaggctggtggatcacctgaggtcaggagttctagaccagcctggccaatatggtgaaactccatctctactaaaaatacaaaacttggctgggcgtggtggctcacgcctgtaatcccagcactttgggaggccgagatgggcagatcacctgaggtcgggggttcgagaccagcctgactaacatggagaaaccctcgtctctactaaaaaatacaaaattagccgggcatggtggcacatgcctgtaatcccagctactcgggaggctgaggcaggagaatcacttgaacccgggaggcggaggttgcagtgagccgagatcacgccattgcactccagcctgggcgacaagaacaaaactctgtctcaaaaacaaacaaacaaaaaaacaaaacttagatgggtgtggtggcaggcgcctataatctcagctactcggggggccgaggcaggagaatcgcttgaacctgggaggtggaggattcagtgagccgagatcgcgccatcgcactccagcctgggaaacaagagcgagacttcatctcagaaaaagaaaaacaaaatgattgaagagaaagttatctttaagtgtcccacctaatttttaacaccaccatcctgttatttttattcctacatttcaccaagtttctccctccctgaaccttattccttgttcttcttccttaaaagaaaagatgctttaggccgggcgtggtggctcacgcctgtaatcccagcactttgggaggccgagacaggtggatcacgaggtcaggagatcaagatcatcctggctaacacagtgaaatcccgtctctactaaaaaaaaaaaaataatacaaaaaattagccagggcgtggtggctggcacctgtagtcccagctactcgggaggctaaggcaggagaatggcgtgaacccgggagatggagcttgcagtgagctgagatcgcgtcactgcactccagcctgagcaacagagcaagactatatctcaaaaaaaaaaaaaaaaaaaaaaaaaaaaaaaaaaaaaggccgggtgcggtggctcacgcctgtaatcccagcactttgggaggctgaggtgggcggatcacgaggtcaggagatcgagaccatcctggctaacatggtgaaaccccacctctactaaaaaatacaaaaaattagccgggtgtggtggcaggcacctgtagtcccagctactcaggaggctgaggcaggagaatggcatgaacccaggaggtggaacttgcagtgagctgagatcacgccactgcactccagcctgggcgacagagcaagactctgtctcaaaaaaaaaaaaaaaaaaaaattagccgggcatggtggtgggtgcctgcaatcccagctagtcaggaggctgaggctggagaatcccttgaacccaggaggtggaggttgcagtgagccaagatcacgccattgcactccagcctgggcaacaagagtgaaactctgtctcaaaaaaataaataaacaagtaaaataaaataaaataaaggtgctttcagatgtctagatagatctatattccctgtgaactgtcaggaaagggtcaactgtcagtgatctctccccttctcgcttttctccagagcaccctgcacagtgctccacactttgaagaaacccagcaatctttaaatttaccctcaaaggatttgtagccattttgtctgccaccacctctaaatccagcaggataatactcatttcaaggctgtccctaattaatttgtaattagaactaaagattaaatgaaggcctccaacataaaaaaatctgtgaagaccccaaaaatctcacctcaacatcactgtctttgaggggttgtgccagcatcttgtcatgtgaggaccacaggtcagcatccttgtgggccccgttgactggcatcgtcattgcactggttcgaagctgcctaaaaaaatgggaaaaacatgtgtagcttccagaattaaatttatttattttatttattttttatttatttttgagatgtagtctttgttgcccaggctagagtgcagtggcatgatctcggctcactgcaacctccgtctcccaggttcaagagattctcctgcctcaatcttctgactacaggcgcatgccaccatgcccggctaattttttgtatttttagtagagacgaggtttcactgtgttagccaggatggtctcaatctcctgaccttgtcatccgcccacgttggcttcccaaagtgctgggattacaggtgtcagccaccgcgccccacctatttatttttatttttttgagacaagactctcactctgtcacccaggcaatggcgtgatcttggctcactgcaacctccgcctcctgggttcaagtgattctcctgcctcagcctcctgagtagctgggactacaggcgtgcgccactacgcctggctaatttgtgtatttttcgtagagatggagttttatcacgttggtcaggctggtcttgaactcctctcaagtgatccgcctgcctcggcctcccaaagtgctgggattacaggcgtgagccaccatgcctggccgcagcattatattgaatcaaagctcatcgaaacctgttagttctatcaagttgataaactaacactttttttagcctttccctcagaattgcttggtaaacacgagcatgttctattgcaaaaccaccatgtggaacttctggttcctttccaaactgcagacgtcagctcatctccctcagaaatgagaactgaccctcctccccacctgcagggagcccaactccgcctcctctcagccaaacttctcatggatatagcttatctcccacaactaaactaagttccttgaaggtaaggactgagtgctactttttaaaaaatctcctgcggtacccaacactgctatacatgaagaatattttccggccgggcacggtggctcacgcctgcaatcccagcactttgggaggccgaggtgggcagatcacaagatctggagttggagaccatcctggccaacctggtgaaaccccatctctactaaaaatacaaaaaatgagctggacgttgtggcacatgcctgtagtcccagctacttgggaggctgaggcaggagaatctcttgaatctgggaggcagagcttgcagtgagccgagatcacaccactgcactccagcctggccatagagcaagactccacctcaaaaaaaaaaaaaaaaaaaaaaaaaaagagtattttccaaatgactgaacagatgaatcattgacttgaaacaattccactggcagggaactggcaggccctcataaaatagtaaatattcactatttagcaacttttcaaaagattttttgggacacacaagttaatgatgaacaggatataggcagttgggatcatctttccaggatgaccaccagtagtattttataaatgataatgtaagtacagcaaatagcacctattcactcagtctggacacatttctccaggctccagaaaaatgtaaatgggagttttgctataagaagggcctcaaaaatctctgtacgatttttgaatacataaggacctcattttaatcctagcaacactttaatgtgttaatttatttcatacttcaagtaatgaaattgaggctcagggccaggcatggcaactcacacctgtaaccccagcactttgggaggccaggagttcaagaccagcctgggcattgctacaaaaaaaaaagttagctgggcatggtgggatgggcctatagtcctacctactgagctaggactctttttttttttttttttgagacagagtctcactctgtcgcccaggctggagtacagtggcgcgatctcggctcactgcaagctccacctcccgggttcatgccattctcctgcctcagcctcccaagtagccaggaacacaggcacccaccaccatgcctggctaattttttttttattttttcagtagagatggggtttcaccggttagccaggatggtctcggcctcccaaagtgctgggattacaggtgtgagccaccgcgcccagcctgggctaggactcttaaaaaaaaaaaaaaaagaactaaagaaagaaaaacgacgttagaaaagtgaaatattgtggctgggcgcagtggctcatgcctgtaatcccagtactttgggaggccgaggtgggcggatcaggaggtcaggagatcgagaccatcctggcctacacggtgaaaccccatctctactaaaaatacaaaaattagccgggcgtagtggctcacgcctgtaatcccagctactcgggaggctgaggcaggagaatcacttgaacctgggagtcagaggttgcagtgagccaagatcaccactgcactccaggctggcaacagagcgagactctgtctcaaagaaaagtaaaatatcttagcccagggctgcacagaaagttagccacagaggcaggactcgaaaccccaaagcacatgctctaagtaatccacagagttcctgtgaagctgttagttaaaatatgtacttgggctgggtgtggtggttcatgcctgtaattccagcactttgggaggctgaggcaggaggatcacttgagcccaggagttcaagactggcctgggcaacatggcaaagccccatttctacaaaaaatacaaattattagctggtcgtggtggcatgcatctgtagtcccagctattcaggaggctgaggtgggaggatcacctgagcctggaagctagaggttgcaatgagccgtgattgtggcagtgcattccagcctgggtgacagagtaagaccctgtgtgtgtgtgtttttttcttttaaataaaaaaaggacttgtttgaatataaatcttcctaaagaattacaggttgggctgggcccagtggctcatgcctgtaatcccagcactttgggaggccaaggcgtgcggatcatgaggtcataagttcgagaccagcctggccaacatgactaaaaatacaaaaattacccaggtgtggtggcaggcacctgtaaccccagctacttgggaggctgaggcaggagaatcgcttgaacccgggaggcggaagttgtagtgagccgagatcacaccactgcactctagcctgggtgacaaagcaagactctgtctccaggggaaaaaaaaaaaagggcctggtatggtggcttatgcctgtaatcccagcacttaggggagtcaaggcaggaggatcctttgagcctaggagttcaaccacagcctaggcaacacagtgaaaccacgtctctacaaaaatttagaaattaggctgggcaaggtggctcacatctgtaatcccagcactttggaaggctgaggtgggcagatcaacttgaggccaggagtttgagaccagcctggctaacatggtgaaaccctgtctatagcaaaaatataaaaaattaattgggtgtggtggcacacacctgaggcatgagacttacttgagcctcagaggtggaggctgcagtgagccgagattgtgccactgcactccagtctgggtgacagagtgagactgtgtctcaataaaaaaaaaaaggccaggtgcagtggttcacgcctgtaatcccagcactttgggaggccaaggcgggcagaccacaaggtcaggaaatcaagactgtcctggccaacatggtgaaaccccatctccactaaaaatactaaaattagctgggtgtggtggcgcccgcctgtaattccagctactcaggaggctgaggcagaagaatggcttgaacccaggaggcggagactgtagtgagcagagatcacaccactgcaccgcagcctggcaacaaagcaagactctatcttaaaaaaaaaaaaaaattatttggccaggcacagtggctcacacctgtaaccccagcactttgggaggccaaggcgggcggatcacctgaggtcaggagttcgagaccagcctggccaacacagcgaaaccccgtctctactaaaaaatacaaaaattagatgggcatagtggtgggcccctgtaataccagctatgcgggaggctgaggtaggaaaatcgcttgaacccaggaggtggaggttgcagtgagccgagatcataccattgcactccagcctgggtgacagagcaagactccatcacaaaaaaaaccaaaaagaaatacacaaggccaggcatggttgcttacacttgtaatcccagaactctgagaggctgagacgagaagatcacttgagcccaggcgttcaagaccagcctaggcaacatggcaaaaccctgtctctaaaaaaaaatacaaaaaattacccgagcctggtggcgcacgcctgtattctcagctactctgggtggctgaggcaggatgatcacttgagtcccggaggttgaggctgcagtgagcccagattttcccacagcactccagcctggccaagagaacaagaccctgtctcaaaaaaaaaaaaaagaaaagaaaagaaagaaagatgcaataaatgggtgcaaggctactttagactgggtcagggaacgtcccggagctgaaatctgagctgtggaaaggagccaaccatgaaatctgggatgagagcaatctacgcagagtaaacaagtgcagagcaccccaagttcaaaggccagacaaaggagaaagtgtgactggccaagggtcagaaatcaggcttgcacacctgaagtctggggagtcacaggaccacaagagtcaagaccaccctgggcaacatagggagaccccgtctctctaaagaaagaaaaaaaagcggtcaggcgcggtggctgacgcctgtaatcccagcactttgggaggccgaggtgggtggatcacttgaggtcaggagtttgagaccagcctggccaatatggtgaaaccccatctctactaaaaatacaaaaattagctgggcgcagtggctcaattcctgtaatccaagcactttgggaggccaaggcgggtgcatcaccccaggtcaggagttcgagaccagcctgaccaacacggtaaaactccatctctactaaaaatacaaaaatgagctgggtgtgtggtgcgcacctgtaaccccagctactcaggaggctgaggcaagataatcgcttgaacccaggaggttgcagtgagctgagatcgtgccaccgcactccagcctggacaacagagcaagactctgtctcaaaaaaaaaaaaaaaaacaaaaacaaaaattagccaggcatggtggcatatgcctgtaatcccagctactcagcaggctgagaccaggagaatagcttgaaccagtgaggtagagattgcagtggaccgagatcatgccactgcactccagcctgggtgacagagctagactccgtttcaaaaaaaaaaacaaaaaagaaaaaagggggctgggtgcagtggctcacatctgtaatcccagcactttgggaggccgaggcgggcagatcacgaggtcaggagatcgagaccatcctggctaacatggtgaaaccccgtctctacaaaaataaaaaaaaattagctgggcgtggtggcggcgcctgtagtcccagctactcaggaggctgaggcaggagaatggcgtgaacccgggaggcggagcttgcagtgagccgagatcgcgccactgctctccggcctgggcaacagagtgagactccgtctcaaaaaaaaaaaaaaagaaaattgggaatcttagggacatcttcattaacattcagtaatacctggtaagtcccccagccaacacagctcactgcaacatcagtcattacaacattggatatttctgtagaggcactgttgctcatgtgtggcatgatcctcaacgtcagggaaaaagacctagtaagtgaagtcacctgcaaggtcaccagcctccccatgcctccaaatcttacctgggcctctgtcacataagaggatccagccaaggatctgctcagggaactaacttgttgcacatcttctatctcacacacattttgtgttctcttctttacagaagaggaaattgaggcccagggagctaacttgtctaaagccatataagagccagaatctgaacaatggtttctcttcagttccaaggccttgtcccaggacattgcactaaataaaaacacaattacccacttccgttccaagttcccccaagtaataaatttacgttatttcttttcttttttttcttttctttctctctctttctttcttttgagatagagtctcactctgtcactcaggctggagtgcagtggcgtgatctccgctcactgcaacctccacctcccgggttcaagcgattctcctgcctcagccttccgagtagctgggattataggtgtgtgccaccatgggcagccaggtttttttgtatttttagtacagacggggtttcaccatgttggccaggctggtctccaactactaacctcaagtgatccgcccacctcggcctcccaaaatgctgggattacaggcatgagccaccgcgcccggcctacaatgttatttctgcaagaacctaaactggtgtttccagtctattctctgggtaactgcccgattgaaggcccgcatctgtgctgacctcagctggaccaagggtcacttaactcccggaatctcgaagccaaggcaccgggccaagaacttcacagtgcaacatttgtctcctagaacagggggtggcagattgcgggcaacaggaagagctcattccccacagggatctggtggcacgggccaaaagtggagcgaccctgcgcgcagcctttaggggcgcaggctttgagaacccgggttctattccgggctctgccatttaagttgcctcctttctcagggccccaccaccttcctcacctgtaaaatgggggaaacagtagcacttgacttgcagctttgttgtgaaggagctaggattgtttaaatcgaaaatgctcaacgagaaaagtgttcagtggagagctactactcacatccccgataagccttcgcattcttgccaaaggccacgggccgccaccccatcataccgaatgtgcctggaactggggcgctgcggctggccgccgcccgatccccagcccaggcgcgacccaagcgctcccctcccgtcattgcggctgcagagggtggggtacggcgggggacagcgaggacgccgaagcaccccccgggctctgggacgccgcggccctcggacccgaagccgcccacctaccggaacacggcccgcgcacgtacctagcgacgcctccgtcctacgccgccgccggtgccaccagtcccagacccgctgacccaacgccccgcgcaccgccgcgggccagccacgtgaccagccgctccaaccccaaaccccgaacttggcgctggaccgctcgagctcaggaaggtgcactctgcgcgccaggcttgggcttggccccgcccccggaggcgcccaatcagagagcgcagccaagcatgggccgccaccaaacgcacccgcgctattggctgcggcgcagcggcgggcagggcctgtttctccggggcgggccggaggccgcgtagtgcagctgcgcacctggggcagggacctgcagaactgacccgctttggctgcagggctggtgtgtggaccaagatttccaggaagactacacagggccttcctcacttaagcctgtcgcttgggccgtgggattatgagtgaattttgttcatggtactacttttagtttgcagggtggtcatttaaagtaggacaaatgtgcgtccaaactgcaacattattactctgtaggtgtataatccaagagcagacactttattattattatttttgttattttttatttttatttttttgagacagggtctcactctgtcccccaggttgaagtagagatgggggtctaactatgttgcctcccaggaggcggaggttgcagtgagtcgagatcgcgccactgcactccagcctgggggacggagcgagacaacgtctcaagaagaataaaataagataaataaaatactgacacacaataaggactcaatgaacattacctattgttaagaatgataaaaaccggggccacatgtcaggaccacctgaggctgcgtcataaatttttttatttgtcaaatgataacaataattattataagaatgataaaaaccgggcgcagtggctcacccctgtaattccagcactttgggaggccgaggcagatggcttgagcctaggagttcaagaccagcctgggcaaaatggtgaaaccttgtctctacaaataattttaaaattagctgggtgtggtggcagtcgcctgtagtcccagctacttggggggctgaatgggaggatcacttgagcctgggaggcagaggttgcagtaagcaatgatcttgcctctgtactccagcctgggcaacagagtgagaccctcatcatctcgaaaaacaaacaaacaaaaaatacaaaaaaaacttttttttttttttgagacagagtcttgctctgtcgcccaggctggagtgcagtggcgcgatctcggctcactgcaagctccacctcccgggttcacgtcattctcctgcttcagcctcctgagtagctgggactacaggcctccgccaccacgcctggctaatttttttttatttttgagacggagtctccctctcttgcccaggctggagtgctgtggcgcgatctaggcccactgcgagctctgcctcctgggttcatgccattctcctgcctcagcctcccgagtagctgggactacaggagcccaccaccacgcctggctaattttttgtattttcagtagagacagggtttcaccatgttagccaggatggtcttgatctcctgaccttgtgatccacctgcctcagcctgccaaagtgctaggattacaggcgtgagccaccacacccggctaatttttgtatgtttagtagagatagggtttcaccatattggctaggctggtcttgaactcctgatctcaagtgatccatcctcctcggcctcccaaagtgctgggataacaggcaagagccactgcgcctggccaacatagtgagtgtttttgttttttgtttttgttttatttatttatttatttgagatggagtctcgctctgtcacccaggctggagtgcagtgatgcgatcttggctccctgcaacctctgcctctctggttcaagcaattctcctgcatcggcttcccgagtagctgggactacaggcgtgcaccaccatgcccagctaattgttctttttgtttgtttgtttgagacggagtctcgctctgtcgcccaggcatgagtgcagtggctcgatcttcgctcactgcaatctccacctcccaggttcacgccgttctcctgcctcagcctcccgagtagctgggactacaggcgcccgccaccatgtccggctaattttttatatttttagtagagacagggtttcactgtgttagccaggatggtcttgatctcctgacctctgatccgcctgcctcggcctcccaaagtgctgggattacaggcatgagccaccgcgcccggccgtgcacagctaatttttgtatttttctcacagacagggattcgccatgtcagccaggctggtctcgaactcctgacctcacgtgattcacctgcctcggcttcccaaagtgctgggattacaggcacaagccaccgcgcccggcctgttgtttgtttttttgagacggagcctctctctgttgcccaggctgaggtgcaatagtgtgatctcggctcactgcagcttccgcctcccgggttcaagcagttctcccacctcagcctcccaagtagctgcgactacaggcgtgcgccactacgccctgctaatttttgtatttttagtagagacgaggtttcactatgttggtcaggctggtctcgaactcttgacctcagatgatctgctcgcttcagcctcccaaagtggtgggattacaggcataagccactgtgcccaacccgtgagttttttaatatccaaagtaagatttctgggtcaagcttttagtaaatattgccatattgctttctacaagcattgtaacaattcacactcccagcaacaatttagggaaatacccatttcccatttcttctccagcactgaatgcttcattttttatttttttattttttttagatagagtctctgttgcccaggctggagtgcagtggcgtgatcttggctcactgcaatctctgcttcctgggttcaagtgattctccttcttcagcctctcgagtagctggggttacgggcatgcaccatgacacctggctttttttttttttttttttttttttttgtatttttagtagagacggggttttgccatgttggccaggctggtctcaaactcctgacctcaagtgatccacctgcctcagcttcccaaactgctgggattacaggcatgagctactgtgcccggcctactgatacttaaatttttttttttttttttttgttttttgagatggagtcttgctctgtctccaggctggagtgcagtggcacaatcttggctcactgcaacctctgcctcccaggttcaagcaattctcctgcttcagcctcctgagtagctgggactacaggcacccaccaccacgtctggctaatttttgtatttttagtagagatgaggtttcaccattttggccaggatggtctcgatctcctgacctcatgatccacacgccttggcctcccaaagtgctgggattacaggcgtgagccaccgcgcccagctaaaaaatattttatttgtggctgggcatggtgactcaggctcacacctgtaatcttagaactttgggaggctgaggtaggaggattgcttgaggccaggagttcaagagtagcctgggcaacatagcaagatcccatctctatgaaaaattaaaattaaaaaaattatgacattttgtgctacatgatgaaaaaaattaaaaagaaagaaagaaaattggccaggtgtggaagtgcacacctgtattcccaactagtcagggtgctgagtggggaggatctcctgagcccaggagttcaaggctgcagtgagctgtgatcgtgccactgctctccagcctaagatacgggaaaaaccaaagcgtttttcttttcttttttttctgctgtcatcgtatgaaatagtctataggtttccattatatccagttacagagggtgttactgagttacagattttctgcctgctggatctgtccgtttctgatagagggacattgaagtcgccaactataatagtttctccttgcagcgctgtcactttttcagtcacatattttgatgttctgttgtcaggatcatacatgttaaggactgttatgtcttctttgagcattgactccttaatcattatgtaatgacctgtccttatccctcacaactttcttttctttcccttccttccttccttcctttttctttttcttttcttttctttctttttttttttttttttgagacagagtctctgtcaaccaggctggagtacagtggcatgatctcagcttactgcagcctctgcctcccaggctcaagtgagtctcgtgcctcagcctgaggagtagctgggattacagtcgagtgcaaccatgcccagctaatttttgtatttttagtaaagacagggttttgtcatgttggccaggcttgtcttgaattcctggcctcaagtgatctgcccgccttggcttcccaaagtgctgggaagccacccagcacctgtcctgttcctgatgactttccttgccctgaagcctgtactgtctgaaattaatatagggactcctgcttccttttgattagtgttggcatagtagatctttctttatccatttacttttaatatatacatctttaaagtgtagttcttacaaggagcatatagttgcatcttgttttttgctgtactctgacaatctctctctttttttcttttttttttttgagatggagtcttgctctgttgcccaggctggagcgcagtggcacgatctcagctcactgcaacctctgcctcctgggttcacgcctttctcctgcctcaccctcccaagtagctgggactacaggcgcccgccaccacgcccagctaatattttgtatttttagtagagacagggtttcaccatgttagacaggatggtctcaatctcctgacctcgtgatccgcccaccttggcctcccaaagtgctgggattacaggcgtgagccacttcgcccagcccaatctctctcttttaatcggttaatttggaccattgatatgcaaaggaattgttgatataattggattaatatctgcctttttttttttactgttttctaattgttgcttttgtttctttgtatttttgtcttccattctttttctgcctcttgtagtgttttgtctttgtgtttttctttcttttttttttcttttgagacaaagtcttgctctgtcacccaggctggagtgcagtggcacaatcatggtttatcgcagcctcaagctgctgggctcaagcaatcctaccatcttggcctcccgagtagctgggaccacaggtatgcaccaccgtgcctggctaattttttttaatttaattttttgtagagacagagtctacgatgttgcccaggctggtctcaaactcctgggctcaagtgatccttctgcctcagcctctcaagtagctgggactacagtcacataccaccacgcctggctaattttttattttctgtagagatagagatgggattttgcaatgttgctcaggctggtctcaagctcctggcctcaagcaatcctcccgtctcagcctcccaaagcactgggattacaggcatgaaccactatgcccagccataaataaaatatgttttagagtgtctgtgtccactgataagggcgtagtcatttcttccctcgccggctcctgtaagtgctgaggattccactgcactgaccccggttgtgccctcggggaatgttgagtcctagcagatgttaaacaacatatgacacacctaagcatttcactggacttacactacacaggtggctgttagtttgattttctttctttctttttttctttttgagaaagtctcgatctgtcacccgggctggagtgcagtggcacgatctcggctcactgtaacccctgcccccccaggttcaagcaattatcatgcctcagcctcccgagtagctgggattacaggcgcccaccaccacgcccggctaatttttttgtatttttagtagagacggggtttcaccatgttggccaggctggtcttgaactcctgacctcatgatccacctgcctcagcctcccaaagtgctgggattacaggcgtgagccaccgtgcctggccaattttcttctgactttatgtctctcacccctgcctctcagagcaaaaggttttctgcttacctttgctgcccatgagctttgggctgctgggataaaagaaggcgccactgaaaaggaaagttttcctgctcttataaaaattctaatataacccacttaaggtgaagaggttgatgatgatgagagtaaggagagcaggcaaagctttctcaggatggagagaagatggggtaccaggattagattctcaacctattaggaaaaaaaaccccaaaaaaccagtgatttataaaatagaagagtttatttctctctcccataacacaatctgggggtagacactccaagactggtcttggaccttgaccttcctcccatcaaaaggtagactccaatgccacactcggtaagggctggtttggtgacaggctcctaagacatggaatgaggctggtgggcacagtggttcatgcctgtaatcccagcactttgggaggccgaggcaggcagatcacttgaggtcaggagttcaaaaccagcctggccaacaaggtgaaaccctgtctctaccaaaaatacaaaaattagccaggtgtggtggcacacggctgtagtcctagctactcaggaggctgaggcagaagaattgcttgaacccaggaggcagaggttgcagtaagctgagatcgtgccactgcactccagcctgggcaacagagtgagaccctgtctcaaacagacaaacaaacatcaaacaaacacaaagaaatggaatgcggccgggtgtgatggcgcacgcctgtaatcccaggaggctgaggcatgtgtatcctttgtgctcaggactttgagaccagcctgggcaacatggtgagaccctgtctctacaaaaaatacaaaaatcagccaggcatgatggagcatgcctacattttcagctacttgggaggctgaggtgggaggacctcttgaatctgggaagttgaggctgcagtgagccaagattgcacccctgcatttcagcctgggcaacagagtgagaccctgccttttaaaataaattttaaaataaaaaaattttaaataaagaaacaaggaagttgatttttatacactgtgtaagataaggatccaatttcttctgcatgtgggtatacaattttaccaatactgttgattaaagtggctgtttttttccctctttgtacctgaagagactgtccttgtcccctttgtcagaaatcagttggccataattgtgtgggtttatttctgggagagtgagaccctgtcttgaaagaaagagagaaagagaaaggaaaaaaggaaagaaagaaagagaaagacaggaagaaaggaaggaaggaaggagaaggggaaggaaggaaggataaggggaaggaaggaaaaggaaggaagggagggagggagggagggagccgggcgcggtggctgatgcctgtaatcccagcactttgagagtccgaggtgggcagatcatgaggtcaggagtttgagaccagcctgaccaatatggtgaaacctcgtctctactgaaaatacaaaaattagctgggcgtcgtggtgcatgcctgtaatcccatgtactcaggagactgagacaggagaatcgtttgaacccaggaggcggaggttgcagtgagccgagatcatgccattgcactccagcctgggcaacagagtgagactccatctcaaaaaagagacagagagagaaaggaagaaggaggaggaggaggaggagaaagaagagaagagaaaaggaaaagaaagaaatggaatgcaacagaagtgacactgtgtgaacttcaaggctaggtcatgagcagtgtccactctctctggaaaactcactcttggaaccctgccaccatcctgtgaggagggccagtccacacacagaggctacctgaaagccccactgaggtctcagctgacagacagcaccggccatcagacatgggagtggtcttcacctgtggtctccgtctccaccctccatctgacagtaaccacaagaaagacccaaggcaaacaccatttagctgagccgaggcaatcaccagaaccaagagacataataaacaattaatgatagtttcataccatgttatgactcagcgacatttctaaagaaaaaaaaatccgttaagtttggggtggttcattaagcgtcaacagataacacatgtgttctaccctgtctcccagaattcctcgacaggattaagacccagttacctgtagcagtaatttacttgataacaatgctgttggtgactattttccccatcctactcccttgtcactgtttctcaagatcatctcccaaggccacaggcagtggctcacgcctgtaatcccagcactttgggaggccaaggtgggtggatcacctgaggccaggagttggagaccagcttggtcaacatggtaagaccctgtctctattaaaaatacaaaaattagccaaacgtggtggtgcgtgcctgtaatcccaactacttaagaggctgaggcaggagaatctcttaaattcaggaggcagaggttacagtgagccgagatcgcaccactgcactccagcctgggtgacagagtgagactcctcaaaaacaaaacaaaacaaacaaacaaaaaagatcatctcccaaataaactacttgtatcaaattactaattcagggtatgccactggagaacccacttaaaagcagtgtgataattaagagcaggaactcagtggccaaggtgagtcagttcagaacccaattctaacatacattagctattgatggtggtaagttgcttaatgtccctccatttcagtttgctcatgtgtaaaatatgaataaatggacctacctcactgggttcttgtaagtttgaatgaattaacatgtgtaaagtgtttaaaacagttccagacacatagcagagtaaatgtgttctgtaaatatacaaacaaacaaacctgttttaaataataaagataatttattgcctcaggtaactggaaaattctagttgttatcactggaattcaggaattgcttgatcagggcttcgactccattttggaactgttctttcaactctgccctcccccatgggttggcttcatacttggactggattctttgtggtaagaaaaagtaggggctgggtgtgcacagtggctcacacctgtaatcccagcactttgggaggcagagacaggtggatcacctaaggtcagaagttcgagactagcttgaccaacatggtgaaaccccatctctactaaatatacaaaaattagccagtgtggtggcagatgcctgtaatcacagctactcaggaggctgaggcaggagaattacttaaacccaggaggcagaggttgcagtgagccaagattgtaccattgcactccagcctgggtgacaagagcaagactccatttcaaaaaaaaaagaaagaaaaagtaggggcagggctggcctcgttgctcatgcctgtaatcccagcactttggaaggttgaggtgggcagatcacgtgagatcaggagttcgagaccagcatggccaagatggcaaaaacctgtttctactaaaaacacaaaaattagctgggcagtggctggtgtctgtaatcccagctacttgggaggcccaggcaggagaattgcttgaacctagaaggtggtgactgcagtgagccgagatagcaccactgcactccaacatgggcaacagatactccatctcaaaaaaaaaaaaaaaaaaaaaggccgggcgtggtgagtcatgcctgtaatctcagcactttgggagacagaggtgggtggatcatttgaggtcaggagtttgaaaccaacctggccaacatggtgaatccccatctctactaaaaaatacaaaaattggccgggtgctgtggctcatgcctgtaatcccagcactttggaaggccgaggtgggcggatcacgaggtcaggagattgagactatcctgtctaacacggtgaaaccccgtctctactaaaaatacaaaaaattagccgggcatggtggcgggcgcctgtagtcccagctacttgggaggctgaggcaggagaatgatgtgaacccgggaggtggagcttgcagtgagccgagattgcgccactgcactccagcctgggagacagagtgagactccatctcacaaaaaaaaaaaaaaaaaaaaaaaaaaaaaaaaattcttaaaagctcaataaggagataacaaaaaaacaaaccttaaaaaattcatgtggtagttgaataattgcctcccaaagatgtccacccaataatggcctcccaaagatgttcctaatccccggaacctgtgaatgaatatgttacttatatggcaaaaggggttgtgcagatgtgattcaattacagatcttaaaataaggggaatatcctggataattcaggtgggctcaatgttaagaacaggattcctgaacagatgaagaagaaggagaagagtcaggggggagatgggatgatggaactgcagattagagtgatacgatagctggtcttgaaggctgaggacgtcaccacaagccagacagtataagtggcctctaaaggctggaaaaggcaaagaaatgatttcctctagagcttcaaaatgaatgcagtcctaccgacaccttcgttttagcccagtgaaactcgttttgcacttccaatcaccagaatgataaaatgataatttgtgttgtttgtgtgtgtgttttgtttgttggttttgagacaaaatctcagtctgtcgcctagctggaatgcagtggtatgatcatgactcactgcggcctcaacccccgaggctcagacgatcttcccacctcagcctcctaagtagctgagattacaggtaggtaccaccatgcccaggtaattttgaaaattttttgtggagatggggtcttgctatgttgcccagactggtcttgaacttctggactcaagtgatcctcccacctcagcctcgtttgtgttttaaagattaggccgggtgcggtggctcacaccagtaatcccagcactttgggaggctgaggtgggtggatcacttgaggtcaagagttaaagaccagcctggccaacatggtgaaaccccgtctctactaaaatacaaaaaacactttgggaagctgaggtgggtggattacctgaggtcaggagttcaagaccagcctggccaacacagtgaaacctcatctctattaaaaatacaaaaattagccaggtgtggtggcatgcgcctgtagtcccagctactcgggagactgaggcaggagaacccatgaggcagaggttgcagtgagccgagatggtgccactgcactcaacctgggccacagagcgagactctgtctccaaaaaaaaaaaaaaaaaagattataaagattattttaattttttacatcgactaaatttaacacctgttacacaaaatatacaacacaatatattggagtgttttataaaataagtataattgttagaatggcattccagttcacaataccctacaggtgtggtgatccagcaacagaatactacctcaattggaatgactgctgtaacctctttcattaacatgaagcctagccaaataatccgacttccctctcctctacttcacaccccaggctccatgacccactgtatacatttcctattgctgttgtaacaaattaccatgaacttggtggcttaaaataatgcagttttcattacttacagtttttgatgtcagaaatcggaaatgggtctcactggactaaaatcgaggtgtaagctaggcagcatttattctggaggctctagggaagaatcctttctttttcttttttttttgcctattacagcttctagaggccaccagcattccttggcttgtgggcccttcctccctgttcagactcagcaaaggcaagtattgtcctcctcatgttgtctcgctctgacttcctcttctccctctcccttcctctccccagggccccacttccaatgactgccacctcccagggaggggccaagctcaaaggtgaagcagccgggctcggtggctgacgcctgtaatcccagctctttgggaggctgaggtgggcgaatctcctgaggtcaggagttcgagaccagcctggccaacatgctgaaaccccatctatactaaaaatacaaaaattaactgggtgtggtggtgtgcacctgtagtcccagctactcaggaggctgagacaggagaattgcttgaacctgggaggcaggggttacagtgagctgagttggtgccactgcactccagcctgggagacagagcgagactctgtctcaaaaaaaaaaaaaaaaaagaaaagaaaaggtgagtcagggaggccaggggtgaggctggcgttggcccccatagtcattcacacaaacggctcctttctgaagacagttgattgcaggcgtacaatgagtggttagaagacaagtgtcaccaggaataaagtgggagcaggctggggcagaggctgagtggccagtcatctctattggcatctcactcaagacatgggccgggagctgaggacactggagaccactttgtttcctcattgctgtcaggggcctctgctgccctccccacccccactgcccctgtcagctcctccacctctaggaatgggggtttactgcatcccctctccatggccgagttcaggagcttcccatgagattcacccaaaaagggcacaggccttttctatcccatgggggcctgaggccagtatcaggtgtcggtccctggtctcccccatctgctgggacctttctctcctgccaggctgttttgtcctcagcgaggcctgccaggatgaccaggtgatgtcacccagtccgcctgttccatcccctggctccccctcaagccctccttccactaaaaccacggggatttcaggaatgacctggaaagcgacgccacctctgcagaaggggcctgttacgctgggccagtaaaatgagcgcctggaaaggggggtcccatcgcccctttcttgaagacgctgagggtcaccacagaaggaaaaggcagcagccctggtccccagtgtgaggaaaagaccaataagctggcatcactctctgccactcaatctgacttcataaaagccaccaggggccatttctgggtgggggaagaggcaggtaggaaaagccaagtgcatcgggctcccgggcctcagccagagcccaggcttagtggcacctgaagccagccctggtgctgctgcactgtgcacactttataaaatggggccgggcatggtggctcatgcctgtaatcccagcactttgggaggccaaggcgggtggatcacttgaggtcaggagttccagaccagcctggccaacatggtgaatccccttctctgctaaaaatacaaaaattttctgggcgtggtgacggacacctgtaatcccagctacttgggaggctgaggcaggagaatcgcttgaacccggcaggcagaggttgcagtgagccgagatcgtgcctttgcactccagcctgggtgacagagcaagactttgtctcttaaaaaaaaaaaaaatggaccttgtgccagttgtctggagtgaacgtcccctggctgccccatcatgtcagtggagaacacagagccaggccctgggctggcaggacaccccctcctctcctgggggattgagagctgtgggtgggggccagcctggcagcagggcctctgagctggctggagatgtttattaatcctgagctccagagctggggcctctccgctgagcctgcgcctgcatgtgcacgtctgtctccagacccatctgtcctggcccagctccttccctatctgggtgtaatcgccaccgcgctcccctgggcatgtgggtgtaacaagtccaaaccttctgtgggagtcgggcaggctcggccccaccctcaaggctgtgccctttcctcccagactggttatgcaagagcaggcatgagtgtggtttttgtgggtgcatgcgcggcaggcctggggcctggccgcctgctgcctcacctgcaaggaggggcctcccagaaactcccttccccaatgcccagccgccccaccttgccagacttagctgaccagccagcaaggacgcccgctgcctcccacctgccctcctgccctccttcaccagccaagcccagcctgagccagcacctgcctttatgaccatgttcaagggactgagcaaaggctcccaggggaaggggtcccccaaggactccccagccaaggggtcccccaaaggctcccccagcaagcacagctggtgagtgggactaggggatggggagccagggagctagggtgggggtggtgccaggcccaggtccttgagccacctggcggcggcccagagcccaggaccagccccgtgctggcatttggtgtcccgaggacaaagggcccaggggtggactctctccctgccttgggagccgcaggcccaggccgaacttcagccctggcaggaggcaggggatggcctggggctccctacatcctctaagggggcctgtgggccacagattgatgctgctcagcgggagaagtgccggacaggagcctgcactgatgccctcctctgccagaggctgggacacaggagagcctggttgtgtgactgcagctctgccccaaggctctacttggctgggatgacccctggagcctgggtgcagggcatgaggactgagggggtggggtgggatccctggggtagggatgcaggggctgtgctgcctcctgcctaagccagagccctccccagagctctcacccagggccttgttgtattgaagagttaggggttcatggctgggcgcggtagctcacgcctataatccctgactttaggaggccaatgcgggaggattccttgagcccaggagtttgagaccagcctgggcaacatagggagatcttgtttctataaaaaaaataaaaataaaaaacagccaggtatggtggctcatgcctattgcttgagcccaggagtttgaggcttcagtgagccatgatcacaccactgcgctcctgcctgggtgacagactgtgactctgtctttaaaaaaaaaaaaaatcctggtgcaatacctcatgcctgcaatcctaccactttgggaggctgaggcgggtggatgacttgagcccaggagttggagaccagcctgggcaacatgacgaaatcccatctctataaaaaatatacaaaaattatctggatgtagtggtgcatgcctgtagtcagagctacttgggaggctgaggtgagaggatcacttgagcccgggaagtcgaggctgcagtgagccgtgatcactcaactgcactctagcctgggtgacagagcaagaccctgtctgttaaaacaaaacagaatagagctggggcttccttttccagtgggtgtggtgcagggggcactgggcctcccttggaccacccggttctctggggcccagcctcagctctctgtggatggattgggtggcgctcttcccactcactggcttcagctcatctgcagaggaggcagcagcccgcctgggtccagggtgtcgagataagctcagggatgaaaagctggtgtgggagtgggggtgcccattaccccgatagggatcaaggcaccaacagacaccgagtctgggcgtctgggccgacgggaaagacagtggttaagactctcagctaacactctcactgagtgacctgtcctccctggggcacctgagccccacccagggtggagtgtgcagctcctggtgggagcagccatcccaggaggcgggacctgagcaggagtgcccagggcccagcacctgcagctcccactgtccaggcaggctccccagcagtgtgctcctggcctggggcagctcagtcctcagggccctgttggctctggatcacctcacgtgcgatccactcgtttgacatgaacttactgagcacttactgcatgccaggactgttctaggcactggagatgtcgctgtagacagaaccaacaggcccctgccttcaaggcactagccctctagtgggataaaaactaacacgtgctgggtgccgactctgcaccaggcctgcactggatgtttcagacagataaattcaattaatgctcacaatagccctaaggcatagatatttttattaaaatcctgctttacgagtgaggaacctcaggcacagagaggttgagtaacttgcccaaggtcacacagcattaatgatggagaaagatgaaaccaggctgtcttggccacagagttcttccagactgctgtgccttcaccagcactgtcccgttgcctgggggggcccatcctttgacccagttcaaggcttcccctgccccaggataatgatcccccataaggcactgtgctcataaggcttggaccaatctgccctcttttaggtctgcttggccttgtgacctccacagagtgactgcatgcacacagcaggtgctctatggaggctgcagggcgaatgcacagaaaaagccctggggtggaagcaaggtttcccctccgtccctgaccacgtaactcagagcaagttagggcacaatctgggctttgaaccctcaactctggagaatgttagggtgcccagcagtctcttgcgcctgcccccgctccccgactctgacagtgtgaggctcctctagacggctgctgaagccagcactctggcaaagctccctggggtggaggaggtataggggaacacagggctggagtgggaggaggtgggggtggggggcatgctgctgcctccctgccccagccagcccaactgcccctcccagggcccagccaggctggctcaggtactaccggctcacaggggggaagtggcaggcagctgggtggggtcgggaactcactgccagcacagctggctgaggctgggacaccgaggccgcctgacacccagcaccacacagacctgagaccctcaccttttgacccctcatgtggcggggcagtgctaacacccccaaccaggtctagctcacagagcctcctgcagagagagaccccaaagtcagggcagtgtgctaggctgtgggggcgggatggggtggagagagggcaggggacgccacctggatggggcacagaggggcctcttccaccgagctgcccactgtcccctccacccaccaagaatgccacccaggagctgaccctgctcatctcccacatgcaagccagcgccgaccaggtggagcgggacatcctggagacgcagaagaggctgcagcaggtgagaacccggcagcagttggcagggtgtgggcaggctgggtggcatgggaggcccatcatcaggcctggcactccctgagtgccccctggtgatggtgaagatgggacagatgacatttgtcctgcaccgcctgtcccctaacacacggtgggagagagggctcaacttccttctttgctgggctcccctgtgtctttgtcacctgcctcatggacgccctgggcctgaccctgtgcctggcgtgggcctcgaggttggccagcatagctggggtcccaaaggtggggctcaggcccacaatgatgggcagcaggggtgtgggggctctggaccctggcaagtctgcccatcccctgcccacaggaccggctgaacagtgagcagagccaggccctgcagcaccagcaggagacgggcagcagcctgaaggaggccgaggtgctgctcaaggacctcttcctggacgtggacaaggcccggcggctcaagcacccgcaggctgaggagactgagaaggagtgagtggggctgcggcagggctgggggtccctggggaagacccaggcccagccctgacctgctggccaccttcttgacagcatcgagcagctgcacgagcgggtgacccaggagtgtgcggagtactgtgccctgtacgagaagatggtgctgccgccccgacgtgggatccaaggtcgactgggcacacgtgctggagcagaaacaggtcaggagctcaaagtcacaccccagtgtgatcagagggtgatacggaactgcatttaacccagggcctgactgtaggcttgaacagtcagtgtatagtggtgtctcaggggtctgggcagggagacagcagaggagacagtgcagtcagggaagacttcctgtaggaggaggcacatgaagagacctcagaggggtgagagggctcggttgggtcagggtgaagtagtgaggagaggacaattccagaaagaaggagcaaaggcacctgccaggaggaagcctaggattcgatgggaagtggggatttctggccaggtgggcagagccaggacatggggcattctgatccctggttgaggagttgtgctttgatgccacacagaaggggtgtcatcatgacaatagaggaacagtggggaagggcccgggtgcagcagggcgttctgagggccctagagcttggctggaggtgtccaggcaggaagcactgaggctgggtcacagacaaggcaggatggagctggagacttctgaggctgagcccagcgtctgggaaccagtgggactcaggggccactgcagaatggcctctgcagtggccaccctgcagagcagaatggctcaccctgggtgagctgcagggcgtgcacccgggctgctctcaggctcgtccacgctctgcccaaatgaccaagtccacttctccgggtgggagacgtgtggggttctctggctctccaccctggtcctgtggtgactgagccgccggctctcctgcagaagctggtctgcgcaggccagtatgggccgggcatggcggagctggaggaacagatcgcggagctcaacatcgtgcagaaggagatcaacgaccaaggagagcagctgcggagcctggtggggccggtgggtgagccgggaagatgttacatccggggccagccccagcccctgtttttccagtcagagccggagctagatcggctgggccctggggataggggtgggtggggtatggcttgcccagatcttagggggccgtctccctgtgccccacctctcacgggcttgtttctccccttggtcaaggcaggatgccgccaccatccggagccaataccgagacctactggtgagcaggagggagggtcgggcagggtggctgcaggtgggcctgggtggccgcccggaccctgcccggggccagtgttcctgagcgccgcccaatggcgccttttgccccccactttctctctccccaccctgctgctggcggcgggtcctgagcacagagggcggcgtcgtggcgcgggcagagcctgggcagcctgtacacgcactgcagggctgcacgtggcagctgagcgccctggcggagcagcagcgccgcatcctgcagcaggactggagcgacctcatggccgaccctgcgggcgtgcggcgggaatacgaggtcggctggcagaggttggggccaggcgggggcgaccagggccatcctggtcctcaccgccgctccccacccgactcgcccccagcacttcaagcagcacgagctgctgagccaggagcagagcgtaaaccagctggaggaggacggcaagcgcatggtggagctgcggcaccccgcggtggggcccatccaggtgcgctgggggcagggcgagagtgagaagggacgtggtgggcggggaaggggggggtggacgtgggtgcgggggcggggcgtggtccgagggctccgtgctgcggtacccaggcccaccaggaggccctgaagatggagtggcagaacttcctgaacctgtgcatctgccaggagacccagctccagcacgtggaggactacagccgggtgagccctcgggcagcggcagggcggcagggcggcagggcgggaggtcccacagcacaccggcccacaggagaggcactgcacctctcaactagacagagctggcaagtcgcggtggctcacacctgtaatcccagcactttgggaggctgaggctggccgatcacttgaggtcaggagttcgagatcagcctggccaacatggtgaaaccctgtctctactaaaaataccaaaattagctagaggtggtggcacgcgcctgtaatcccagctactcaggaggctgaggcaggagaatcgcttgaacccaggaggcggaggttgcagtgggccgagaatggtccactgcattctagcctgggtgacaaagagggactccacctaaaaaataaaataaaatagagctgtgtggttgccactcggtcccagagggaaggaaaggcatgggcacattctcaacagggtgaagccgttcccaggggggtgaaaattcgttcttaatggcagaaaagtaactgtttttatgcatgaagtacagatccacatacagcacctaagctgtatacagcatatctgtggtataaatatttcatgggggccaggtgtggtggctcacacctgtaattccagcactttgggaggccgagccaggagaattgcttgaccccagtagttccagaccagcctgggcaacatagggagatcttgtttctataaaaaataaaaataaaaactagccaggcatggtggctcgtgcctattgcttgagcccaggagtttgaggctgcagtgagccatgatcacaccactgcactcccgcctgggtgacagactgtgactctgtcttaaaaaaaaaaaaatcctggtgcaatacctcatgcctgcaatcctaccactttgggaggccgaggcgggtggatcacttgagcccaggagttggagaccagcctgggcaacatgacgaaatcctgtctctacaaaaaatatacaaaaattatctggatgtagtggtgcatgcctgtagtcagagctacttgggaggctgaggtgagaggatcacttgagcccgggaagtcgaggctgcagtgagctgtgatcactccactgcactctagcctgggtgacagagcaagaccctgtctgttaaaacaaaacagaatagagctggggcttccttttccagtgggtgtggtgcagggggcactgggcctcccttggaccacccggttctctggggcccagcctcagctctctgtggatggattgggtggtgctcctcccactcactggcttcagctcgtctgcagaggaggcagcagcgaaagatgggtagaaagagatgggggagagacagaggaggctgagagggagaggaggatggagagagcagagagagagaaacagagatggggaaaggggcaagagatgacaagagagacagagaagccagagaggcagagggggagaaagggagagagggagagagagacagagcaggaggtcggggcactctgggtcccagtttccggtgcagttgtaggtcaccatcacctaactgcaggtgcaataaagccctcgtgcctgctgctcgcagcccctgagagtccttcctcctggagaataaaacctttgagggctgcccttcctcactggattttggttgtttctaatgaactgagtcatcctgtctatcaccttcctgggctcatggctccactgaacgctgccccctcggttcgggaggaccagtggtgcccccatctcaccaggctcccaaggaagcttgtgaccttggcttgggcccaaagtagccgggtacccactggggctctgcttctcccttcactaagagaagaaagagaccaaagaatggtctgcacagagggcacctgtgcaaacacccagggaaccagggagttgagccgtcttcatttcctaacagatacattcccttctgtgcctccttaatgagggcatgaagcacagtatgcgtgtgtccagctgtgtgcaaaggcatgtgtgtgtgcatgtgtgttgtgggagcatgcagtaggcagcaaggaaagggcagctcctgctcaaagctgcaagtctctctgaaggaaagatcaagattccctggaccacagcaggacagtgttttcatttgcatccatttttattagcatttaaacctgtatcttgagtagcatataaactttaagttggttaactgttcttacaagcatttacacagtaagataaacatatgataatatacactgaaattatgcaccctgcaccccgccgtccccaccctggccagaactatcttgcaaacctacacccagcaaaagatcccatagtgcactttgggaggtatagacaggaagcctgagtctccatcgctcattccatcttttcaccagctgtgggctaccaggctgcattggtttgctagggcttccttaaagtaccacagactgggcagcttcagcaacagaatctcactgtctcacagtcctggaggctgtaggtccaagatcaaggtgtcggcagggaaagtccctttccagggcggtgcgggaaggctctgttccaggtctctctcctggcgtgtaggtggccttcccggtgtctcttcacctggtcttccctctatgcatgtctctgtgtccaaatttgcccttttataaggacatcagtcatattgaattgggcaccccctactgatctcatttttcattttaacttatttccataagacgctgtctccaaataagatcacattctcaggcactggggctaaggacatcaacataggaatttcaggggacaaattcaacccaccacataggccctccctgaggccacctctgcgtcatctttgtctacaggcaagttggcatctaaaaagtgtctgcccaagacatgcgtctggcccatggtacagccagtccacacggccaatggtgaaatccgggtggcattgtttcctcaccgccatgcctcatgcaagcagctgccttcttataacggtggacacaaatcccagcactggtgcagttgcttgccggctgtgggtgaagtagccccatgtcagtgtgctgcaaagatgcagcttagaatgttacggcttgtgtgaaagatacgcagatttctattccttccaatctgtggtttcaagttctgcttgaacccaaggggctctatagggtgcttctggaacagccggggtgttaggggtgctgaaaaggtgttagggtgcctaggctcaaccccagcttcaatcacacaaataatcttgttgacatgatttttggttaattttttttttttttttttgagacagagtcttgctctgtcgcccaggctggagtgcagtggcctgatctctgctcactgcaagctccacctcctgggttcatgccattctcctgcctcagcctcccaagtagctgggactacaggtgcccgccaccacgcatggctaatttttttttttgtatttttagtagagacgggctttcaccatgttagccaggatggtctcaatctcctgacctcatgatctgcccgcctcggcctcccaaagtgctgggattacaggtgtgagccaccgcgcctggcctggtcagttttttaattgatcttttgtataatttttttgtttaagaaagggatcctttggcagaaagaaaatctgaaactctaaatactgtccattttatccatatattggtcatacccccaaaatatatcctgattccagccatttgtcatgaccgctttaatctgagctcccttcatttttcacctggattactgtaccagcctccccaatggcctccctggtgccacctggcccctccccagggctcagcaagatttttctgcaaaggacctggtagtaagcatcttgggcttcgtggaccctgtggtctttgttgcacctactcagcagttactcagctttccactgcagccccaaagcagccccagacaagaagtgaacacaggggaggaactgtggctccaataaacctttattcacagtaggaggggggcttcatctggattgtgggccatagtttgcccacccctgcctgacctcatgacaacactgaccttcgtatttatgcctcttaaaaacatgtgtaagccgagtgcagtggctcatgcctgtaatcccaacactctgagaggccgaggctggaggattgcctgggggcaggaggtccagaccagcctggataacacggcgagatcctgtctctacaagaaaccatttcaaaagcagccaggcatgggggcccacacatgtagtcccagctattcaggaggctgaggtggggaggattgcttgagcctgggaagtcaaggctgtagtgagctgttttgggccactgcacttcagcctgggtgatggagcaagaccctgtctctctctctctctctccatatatatatatatacatatatatgtatatatatataaaatttatttatagtgtgtgtaatggttgtctacaaggcacacctttaattaatcacagccaaccctcaaataatacccatagtgtaggacccttacaacgttacactcccaactcttctccccacccatcttttgttttctttctttccacagattctgtgtccatcttcctctcctcattgactctgcatgaaggggatttctggtggagtaagggtagcaggtgagaaatgaagtaccaagaaactagcaaagggtcttctggttgtctggggacagtcctcctgtcatccccagcctagtctcaagggttctgggccggtcaccctgctgcctctgtgctgtgtctctggatctggcctccatgggaaggaccctgggagacccagcagagtggggtacctgggttgacaaacagcttcctgttcctctggctatgtggctcaggaataggcccagacagtgcatccagatgtgtgaggccacatcactgccccctttgagatggcccagaggaccttgtggcacaagcgtgaagctcagcacccggagcctgggacaaactgcccctccctgtgtcctggagttggggtccggtcccgagaagactctcagtcacctgtgggtgctgatgaggggagggagaggtctgtggactgagaagggccattggtaggggactctgaacaccaccgctcaggggtctggtcagtgggggtctggtcagcagagattgaactctggggctcagacacagaaaacctgctcagtgaccctttctcctttttcagctcttgccgcacgtgcagagagagaggaacttccagtgcccgctatggagccacagcccacagcatggggaagtccccatccagaggcagtgctgcagctagaggtagctccagagtcctccgggccctgcaccgatacagccaaagaccagcaaagcgacaagctgccagacctcatgccacctgctgtagccactgggctcagccctggagctgagagcatcgctggagatagacgtggcagagaagaggttgcgagcatggccccagccagcagctcccacgctgcccctagtcctgggcatggagcgagccttggtgtcagagaccagggtgtgcagtctgagctcctctaccttactaaagagaggcctcttttatttaccagagccacagccctgctgcctcaggaccttttcattctgccggtgctggggctgtctatctgcaagctggaggtgttgagagcaggaaaaggaggctgtgaggaagggttcgggcagctcctcctgctctcagaggtggcctcctcctccaggcatggaggtctgtccactactgggcttctgggctatttgcccctgatttgctccctggtacgggctcttcttaacaggcaggcaaggggtgcggggaccaggtgagggcttcaaagggtacagtaccaaatcttccaaactcagcacttgtgccctggggtctccaaactgtcttctgccctagaatttattcatactgttaaattaccagtttatgcaaatgatatgtaaataaagctcaattttttgaaacttcatgcctttttgaactctctaatgttagatggtgtttttgaggctatctgaaaatctctgatagttgtgtcttttgttgtggttgtttgtgtgattgagttaccaccaccaaatcaactgttattggaaacatttcaggtatggcttttagaagacctggacctactcttgcctgttttgaccctccagtttattgtggaaggaagtatcatgtggtttcatgtctccggcagatcaatcactttcctccatccatagcagggaggagtcatggcaccccagagggatgaaatacttctccccaagtatttcttattctgtctcttcctctctctcattccctgctccacatctctttctgtctccttttccagttctctctccctcctcatctcactgcatgccactgttcaggctcctggggctccacgtggatgggcggacacgggactcctaggctaagtttcacggcacaagcacagggctgcaggacctaggtcccccacctcccagcaccctcaaaatgagaggtgtggggtgtgcccgtgttctcctgggtgggcgccccacgctccaggaagcagaaactgcaggacaaagctgacacaagtgacatgcccacgtggctgccagcttccctcttgggatctgctgaggccaaagcagaggacacctgcccacaaccgaccccgcaccagggtggggggaggggtgggtttgggggtgggaatggggatgggaacagccactgcaaagcagtccctggctggcttcctgccctgcaccctgtcatgcaaggcctctcctcccgccccacccctgcccctcaccacctccacccctaggctgtccaaatccaggctccagaagtctcccaggatccaagaactaagggcaaccactgggctccgcagcccctagtccatgagtcagccacccctctgcatgctgacaaaccttggctatcacttatcctccaccccaaaccagccccagcctcatcctactgcaggcctgtgtggctgctggagaagccgggctcctttcctcactccaaggctgcctgatatactttctggatcctggagaaaactgacccactattctcatactggtgcagcttcttccaagacctcaaaattggacaacgtgaacttgtcttgtttcttgtctcttcttgctaggactgtcatggggacagtctgagatggggggtggggggagaaaatggatgaatggatggatgaatggacatccccccaccagcattaccacctcctcctaaacatagtcctgagagctctatttcctggtaaacttcctccttcccaccctggtccagggaagcccaaaggccagcgccctccacccacccttcctggggtccactctactgtctgcttgcccagatgtcttaacccagctttaccaagctaggacagatagcagggatgagcccccagcctctgccaggaagatttgccaaaatgttctcagtttagaagcaggggcagtgacggggcctagggatgactccagggttgtcactcaagtagcaagaagggcaaggaggcctgtttcctgcccttaccctgggagaacttggccggggctccacaaggccctgcaggggcagcaggagagcaaatccacgctccttttgaggaagtcaccaccatccctaggaagcagcagatgggggtgcactggcagagccctcgcgtgctatagggcgaggccagcagatctgtactcagcctcagccccaggggagctgcaagatagactgagaccctcacaggtttggctctgtgtccccacccaaatctcatctggaattgtaattctcctgtgtcaagggaggaacctggtaggaggggattggatttggggacagtttcccccgtgctgctccccggatagtgaggtagttctcaggagagctgatggtttcaaaatgtggcacttactggttctccactcactccctcctgccatcttgtgaagaaggtgcctgcttccctttcaccttctgccgtgattgcaagtttcctgaagtgcaagtcaataaagcctgtttcctttataaattacccaatctcaggtatttctttatagcagtgtgaaaacaaacgaatacagtccccttccctgaggtgccttctccttaggcaaccagctgcccccatgctcctcctctgccccctggtatttcctttcccctcatgaggcccaagtgatccacatggccagccccaaccccatcctactgcaggcctgtgtggctgctggagaggccgggctcctttcctcaccccaaggctgcctgatatgctttctggatcctagagaaaactgatccactattctcatactggtgcaacttctttcaagacctcaaaactggacaacatgaacttgtcttgtttcttatctcttcttgctatggctgtcattgggacagtccgagatgcggcaagagctgaaaaaggagagctgctcagagctgaaaaaacctgctcagtgacccttctctttcgtcctcatggtggcttcgtagagtgggtgctgttcccaaatgtacccattcgacaggtgagacatctggggtcagagaggcggtaaccggcctgggaatcagacatgaccctggattctgctctcagccctgctgtgtgccgtgctagacttcaggcctcaaccctgagacctccctgctctagatcccaaatctgcccagatttccgatcccgatggggcagagcctggccctggcagagacactggaatggatccactgtgggtggggaggagggaagggtcctcagaacacacctggggcctaagctgggtcctgatggtcaccgtgggacccactggacacacatagtcccttgtctgggagtggcatggggaggcttctgcccttgggcagttgtggaaagtgaaggagccctggaggactggctgaggggagactaacttcccttgtgttcaaaggggtccgggcactggggttctccccaagtatttcttattctgtctggcctcgctttccttttgccctgagtattatcaggagggacggtccatctagatgttctccaggagcaaggacccactcttctacatcagtgacacaggaacatgaagccccctcctgtagggacagctcagaatggtggagtccacagtccgtccccgagagacatggtttccatgagcacagtggctgctttggagacagtagatcattttcatccccaaaaccaaacacactcctgctcaaatggcgttattcttaaagcagcttcactggttagactgaagggccatggtagcccaagtgatgagcggggtagaacggagcaatcaggagagatcttgttcctcataggaaactgggcatctctgtggccctgagcatcccaggaggccgatcgtacagagacctctggtgcctgaccgcagttcacatccacatccctggaatagcccatcacaggctcttcacccttggcaggtggacaccattcaacctgccagggcaggtgtgtgcccgtttcatggcatatggggacaacgggattctctgtccaggtcccactcttctcgagtccttgggaagatgcccacccctgcttagggcttcagactgcagagacccatggatgtgtgggccacggggtttggaccctttttaccagagcgcagtggtggaatgcaggttatacaaccagccagcatctgggagcccagcgggagcagttcaggggttctctgaagctgtcgggtacagtgtaacctttagacaactttgtctcacaggatggacatggtagagggcgcggatagtgtgcaggcataggagcgggaggacataattatgaagtatcagaaggtacagttcggtctgctccttggagggaggccttttcctgtgcgccctggtcaaagggtcctgggttccctccgagcacagggcagggacaggtggccaatacccccaggcccttgcaccctttaccttggacccctcaccaaggctccctctgggttacagggacaccgagctgggctgccagaggacaaggggcctgaacctgttggaatctacagcagcgttgatcgctttgggattctgcagtgagtcctctgtgctcccctcacccctaaagcagctgtctcagctcagggatgggtttgcttttagaaaggcctttctgacgcaggacatgtctcgccaggtcgggccaacctcttttccagggtcagaactcctccctggctcccctgcaggtccagcccgagattgttgttaggccagaggtgcaaggcccatctagggagccggtgggaatggagagggggctaggccaggcccctgggctctcagcagttctgtcggcaagttagcacaagaggagcggggcagcctgaggttctggccctgtctaccaggagacaaccccagtgagatccaagggttgtggccacagggtgaggagacacctggcccagcctcagggctgctgtccagcaggtctctcagagcccacctgcccctgtcctcccccatttccctagaactacagccctcactgtccccatggggaagggggaaaggtgtggggacagtgggggctttggcccaaagagaatgggggagaagacgggcagggccccgctctgggcatctcatggtgagaccagagaggcagcagggcttgtggctaaagacctgggtctggtgctgggaagggatctggggccaggtaagaggagcccagccaggagcccatccctcggggatcataggatgcagagacagaggatcccgggggaggtagggtgggagggagctgatgagccgtgccacttctgaaatgcagggtgtgtggctcagatgcagggagaggcaggtggatgctgggaggtcagaacctgcaagagccttggggctgtcaagtgggatgggcccctggtgcacccagagtacaccgggcaggtctcagggcaggctcccttgaccctggcggggtgatgtggtcactccctgagggactcctgtcagggcccggtcgcccaccctgggtggcccccatcccatctcagggctaacctttctcagctccagcagaaagcaccaccttgagtccaggacgcgcagccccattgtgcagcctgaccaccccccatgccagggccccagtaaccccagccaggctgtccctgcactccttctcccaggtcctgcccctcctgggagtcagccccacaggaaggtccttgtcctcccttccctgtgacttctccggggctgagccctgagctggatagggacagtgccagtcctttctgggggtcggctcccaggcttgggtggctccaggccctgtgcaggtcctcagctctgcctgagttgccttacagtgagacggagctgcctcctgtgactgcacgggaggcaaaggtaagagcctgatgcatggaggggctggtccagggacgtagggactgggcgggtggtcagtgaggcagaggaagcagctggcctgggcggtggcgggtgagggcaacacgctgtcactgggaggggcagcagagacctgaccccagttgctgtaactttggcagtttgataaaattccaaagtgagaaccacagtcctggcttgggggtggctgcccgcttgtgtcaggaacccacctagaggctgggacctaagactggtgtgtctgtggcctaaggatggcacatcctggggtcccaaagccagcccactggcgctcatttgctcaaaggctctcagcccttagggtctgcccttccctggctccttccagctgggtcccaccagggctccagagcccaagacccagcatccacgggcggctctgggaagcctggcagctccgctaactccaacattcctcatttggcagcaaattcggcaggagaaaaaaagaaagagcaagtggctggaaatgctgggcaaatgcgagacatataaaaacagcaaaaaggtaatgtgtggagggagaggccccggaagtactctctgcagagacagaagagaggcacccatggctgtggcctggcaccgtcagcctctcagagggcgggtggcacactgtccttgcacagaagactgcaggcctggtcgtcagattgcctgcctattcgtgcaagcgtcaccttgctgggagggaatctgaatctagggctgggaccacctggagctcaaggctagggatgccctggtgacctgaaggaagaaaaaggttcggatcacagtttcaactctgagtgtccatccactctttcagtcctgggaagggagaccctgtcccagcttgatctcacctctactgaggaatcatggggccaaaaccaaaaatttccagaatccctgggctctgatcctcactggggtcaccccatggcctgtgacaccagattgttttctgcccacagctcatagatcgcatctataagggcattcccatgaacatccggggcctggtgttgtcagtcctcctgaacattcaggaaatcaagtcaaaacaccccaaaaaatactaggtacgctcagccagagcacaacaaacaggacaggctgtgtcaggggcccaggcctccagctggagggaacgtcaagcccagcctgggggggtgggggggatggtcagatgcacttcctgggcacagacggtgacatagtcaccacagatgaactcggctctggtgaccctccctggcttcagtaacaagccaaaaagcagctttctgcacaaggaaaccttccttctttccttccttcccaaagcgctgactgtgggctgactgccatttggggcagggagtcttccatctgttctgaggctgcttcctcctcttggccctgccctacagatcatgaaggagaagggcaagaggtcttctgaacacatccaccagatcaaactggacgtgagcaggactctccagaaccatgtcttcttcagggatcgatatggagtgaagtaagcctacgagagccacagggtcccagaggagatggggtgaatgagagggatggggactttcccagagcagaagccaggatcacccaggagggatgacaggctgccaagagctctcctagcccagggagcagccggcaccatgaaccaagcacctccctggttccaagccctgggccaggctggaacatgtggggccagaacccaggaggatcctgaggagacagaagacagcaaacaaaatcatgcataatggtgaaaggtgctctccctgacccacggggacccatggtaggacccacgggagggtggcaggatggagagcccatgagcctccccaggcaacactgacagcaccaaatgctgggagaattaggggtcctggaaactctcatccaggtctgctgggaatatgacatggcacagccacgttggcagccagttgggcagtggctcacaaagctcaatggacttgaaccacacgtccccaaggtgtcacagatattgaacccactgatttgaaaactgacatccacatgaaacctgcatgccacgttcactgcttgattcctcatcagtcacacacgaagccttctgggatggccttcaacacgggaatggggagagacagtctggtcctcctttcaaacagaagacccagtgagaaaagggaatgagccagtgatgcccgcaggaatgtgggtggatcctagatgcattttgctaagggaaagaagccagacccaataagctaccacagtaggattcccattcctaggccattctggaaaagaccaaaccatagggactgagaagcagtctgggtggccaggggctgacggatcggggagaggctgggtgcataggggaaaccctggagatttgaaagatcaggagtcactccaggaggggctggagtggtggccgggagactctgcacactggtttggaaccgtggaggaactgtacacccaaagactgaactggcgtgtgtgcaaactgaaaaaaaaaaaaaatcattcagagtgaaaaggatcggtcaactccctgtacaactgggctatttgcatgtcacagatgtggattttactgaaacatttcttcaataatctcaggccctgaaagttcactgcttatctggtgaatcatctgaacctgaaatgggatttgttgttaggatttgtagacaaagtgaaactaacagcatctgcacaaaccaaaccctagccccctttctctgtttcctaggcagcgggaactattctacatccttgtggcatattcagagtataacccggtgagtattcccggcagtgaggttcctgggccatatttccatattcacaggagtgggtgtctgatgggggtgtcgttgcttcttttaaagttagtatttgtgacccaccaggatataggaggtaggattccaggtcactgctggcataaacctccaagcaagggggtggtctcaaggggtcaagctgagacacaaaggacttggggcctggactcctggtgtcacctgggcctgtcacctgggcacttctcagaacaagaaatgacaccctcctcctggggctgccccaaagcctgggagcttggcagtgtcacatgcaggacggtgctctcaggagacaatttggacaaggtgctgaagtgcctgatggacttggctcttgtcatgaaatgaatttgcatcctgaggaagcctcttcagaggaagcctccccagtcacctctgccctctccaatgacatgagtcctcccaggtgacctcggccctcccaggtgatgtccttccatggcgactctggctcttgcaggaggtgggctactgcagggacctgagccacattgccaccttgtttctcctttatctgcctgaggaagatgcattctgggcactggtgcagctgctggccagtgagaggcactccctgccgggtaggtgaacagctgcccgtggggcctcatgcagccagatctggggacagccaccgtggccaggtgatctcggctttcagccaaggcaccatccttgtgtcgccagcttgttgggagcctttaggacgtctctgctgagggtcccacaggagtccgcagctgacccccacagcccaagtcaaatgcctttcatccccatcagcagagggcatctcatcctccccgtggccaccctctgtgtcctggagccacaccctccggctctgactctgtgcagctgactctcccctccctgagagtcctcctgccctccagctgcccaggctcctgctgcccttggtgcccacgaatgggctaaccaagcccaggtggcagcatctccccatcccgtgtcccctggcccaaccccacttccacaagatgaccaggaagcccagcacccaccgtgttctggccgctctgttgtgacctcaaagtcaggcttgccctttttgcaccctagcccaggaggcctccaggggaacctccagccaggctccaggggatgttcttgtcctacctccccagggcaaaggccgcatggtggggtcaccagatgggagggtgggaggccttcaggtttgggggcctctgcagctgcccagctcttgcagctgatggctccacatcttgggggaaggctctgatttcatgatgggctgggggcttctcaggattccacagcccaaatggcgggacagtccaggggctccaagaccaacaggagcatgtggtacccaagtcacaacccaagaccatgtggcatcaggtgagtttattgtccccttggctcttctcagaggccttgcctcccgtggggctataggagcagggggactggagaccctcgtgggactggtgactggcggagtcccagccagggcctgacctgagacgtcgggttctccatgggctgggagtttgtttcctttcctgccctggaggagacagaggcacagggatgggggcccagctcccgcagagcaagtcaaaggtcagtgtgtccactgagagtgtgggaaggggacagtgttgtggggagctctggacaccgcccagtgttctgcactaggggaagggtcttcagaggccctggaagatggaggtttttagggcagcccagggggccctgagcacctctgttcctcccatcaggacaaggaaggtctatgcggacagtgttcctcattaggctgccttctccggatgttgattcaaggggtaaggaggcatagggagaccctggctcagggaccctccttgccctgcagtgccctgcttccccagtccgggggtctggctcactcccagcccacaggaggctcaggcgggtccccgaaggacacacaagcaaaaccctctgcccaagaggggtcatcccagggcaatggctggggctcaggcccagcctcatgggcagactgggccaggacccaacttgagagggctcagggaagcctcaagccctgggcaagcccctctgtccaggagccacatccccactcaaatgagtgccccctatgaggagctgcaagaccttgtctgacccaccattctagatggctcaggcgaccctcatggggaaggtcactgactctggagactgaagccccaatgtgtgcagcttgagccaccagccccagcctggaagggccaggttgtctcacacctgctgtccccacagatctctctcgggctcaccctgcgcttgtgggacatgtatttgctggaaggacaggtgttgatgccgatcagaagcattgcttttaaggttcagaagagtaagtctatgtgtacccagtggggcctggggagccctgcggtcagacccgactggcccaagggcagcttcctcacactgtcctcatgatcctctgttctggcccagagggaggtctggccaggtgggctgggaagggcactgtgatgccgagcccatccctcacatgacccagatgaaggtcaggagtgtggtgagcacttccctgtccagatcaccccccagccacagtctcctgtgtacatctggacgcctggggtggccacaaaaggatccggcacggcccagtgggagactgaagtggccacggggtatgagctgtgaccattcccaggtaactgtcctggcctgatatccaccctgtccctagagcgcctcatgaagacatccaggtctggccttttggcatgttttcggaaccagttcttccatacctgggccacggacgatgacactgtgctcaagcatcttagggcctctacgaagaaactaacaaggaagcaaggggacctgccacccccaagtgggctccagtgccatgtcccctcccatgtcaccctctggggcagtcaatagtgggcgagtgccccggaccagcaaccctactacctgggccttcctcttcaccttttcttccttctcttcctcctggactctaagaaagtacaggaggcccaccagtcctcagggcaggcgctcagtgtgtgtatactggacatgttgtgcacgcaggagggggatgtgggcaagaccctccaacaagccccctcccactttccacggtgtctcgctctgcccctcacagggccctcaaagttactagaggagccaggcccatttgtgggagacccccccctccctacaagcacccacagcctcagagagcagcagaggcccctcactcctgcacctcctccaaggttgccaggacaacaagccttgagcaagggagacaagggaattgggtgtccctgacccacagggcattcagggagagggcacaggcaggaccattttcttgtctacttgattttagagtcagttcttactattaggcagctactaattagttgatattaaaaccagccctcgtttaggcattttactttgataatatagtttttattatttaggcattttataaacttaacctttctcttgctatctccccagaaagatgacaaacctgcatttatagttttgcagctacagataattgtacaagtaactaaatatgtggaattgttaatttgtgtcaagcgctgtactaggcatattatatacataatttactctatatagcccagtataaagtagttaccattataatccacatttttcagataaggaaaatgaggcacagagaatttaagaaatatatataagttacactagtaggatgtagcaaaacccacatttaaacccacatttctccccaaagagcttaaactcctaacttttatgttatactgatttggtacttatcacttttgagtctcagttttctcatctaggaagtacactacttcatttgttcattaattcattcagtcgtttcattgtctaccacgtgctaggctatacagaggtgcaggcacaaggattaaccaggaagaaaacagactgtgtgtgctgtcaagggcataactttccaatgagaggagtcagagagccaggaaataaatgactgtaacgtcatgtggtgacaagaacttttatgaaaaatgaagtaggctaaagtagagagaaagtgttgtattagaagcacattttacatcatatgtggaaaattctggtaatgagacatttgaatagcaagaagaagattctaggcaaaaagtgagacaaagttaagtaggaggatgttctgggaagaacgtgcccatcagtgaggccagagcaaagtgcacaacgggaggatggtagacgacagtttcagagcaatgccaggagctaaataatgccaggccttgggagacattgtggtcagttactgtccaaccaggaggctgaaactgcacagtaatttgaataaggaaaattgaaagtaaataacttaactatttcagggaaatctctcttaaagcaggggtgtccaatcttttggcttccctgggccacattggaagaattgtctcgggccatacataaaatacatgaacactaatagatggccaataagctaaaaaaaaaaatcacaaaaaaacctcatagtgtttttctgtttgttttgggtttttgttgttgttgtttggtttggtttttgttttttgggattttttttgatacggagtctcgccctgttgccagactggagtgcagtggcaccatctcgactcatggcaacctctgcttcctgggtttaagcaattctcctgcttcagcctcccgagtagctggaactacaggcacacacccagctaatttttgtatttttagtagagatgaggtttcaccatgttggccagcatggtctcgatctcttgatctcatgatctgcttggctcggcctcccaaagttctgggattacaggtgtgagccactgcacccagcctgttgttttgtttttttggacagagtcttaactctgtcacccaggctggagtgtagtggcatgatctcggctcactgcaacctctgcctccagactcaatcaattcttgtgcctcagcctcctgagtaggtgggattacaggcatgtgccaccacacctggctaatttttgtacttttagtagagagacgggttttcaccatgttggccaggctggtcttgaactcctgaactcaagtgctctgcctgcctcggcctcccaaagtgctgggattataggcatgaaccgctggcacccagccaaaaatctcatagcgttttaaggaagtttacaaatttgtgttgggcctcattcaaagcagccctaggctgtgggttggacaagcttaggaaaggcaaagcaaacacacacacaaaatagggacagcaaattcacggagctgccagtgtgctctccagagctttaggcaagcactgcaggaagaaacaaatctggaagaatctcccacacacaccagaagtgagtgctagacctccttggagagggtgaggatgtagcctgctagagagcagagaattttgctgagtttctacactgacaaaacactggaaaactgctcccctaagtgctgcttgtgacctgctctgtccccagagaggtgatggccagggttggctgctgtcccccacaagagcaaggtaagaggagcactcagaactagaaagagccccaaccttctccagcgtccctttagcagatgctgcagatgaagtttcacaccgtgccacagaaaaggcaaagccggcaagcaaggtaaaggggggaggtttggaactgatggcaatcagctcaacagtgcaagaaaaatgagttttcttttgaaaagacgttcaacatcactgatcattagagaaatgcaaatcaaaaccacaacgagctaccacctcacactagtcagaatggctattactaaaaagtcaaaaaataacagatgctggcaaggttgtggagaaaaagggaacacttaggcactgttggtgggagtgtaaattaattcagccattgtggaagacagtggcaattcctcaaagacccaagactgaaataccattcaatgaagcaatcccattactgggtgtatacccaaaggaatataaatcattttattataaagacatatgcatgtgtatgttcattccagcactagtcacaatagcaaagacatggaatcaacccaaatacccatcaacgataggctggataaagaaaatgtggtatatacacaccatacaccatggggtactatgcagacataaaaaagaatgagatcgtgtcctctgcagggacatggatggagctggaggccactatccttagcaagcttataagtgggagctaaatgatgagaacacatggacacatagaggggaatgacaaacactggggcctttcgaagggtggagggtgggaggagggagaagagcagaaaaaaaaaatagtgggtactaggcttaatacctggatgatgaaagaatctatacaacaacccccatgacacaagtgtacctatggaacaagcctgcgtatgtaccctgaccttaaaagttaaatttttttttaaaaaaagaaaagagttttgccctcattcaaagaatttgagccaaagggtgacattttaaatgatatttttgaaaaatcggctagatggcttcatggaaagacaaaaggaacaatagaaggagtaaaaagcatctagaaggacaggctactaatcgagacctgagatgacagatgggaaggggtggaagcagtagacctgtaagagatgcttggattcacaaaaggtttgttttttttttgttttttttttttcagtgcagtggcgagatctcggctcactgcaagctccacctcccaggttcacgacattctcctgcctcagcctccggagtagctgggactaaagttgtccaccaccatgcctggctaattttttgtatttttcgtagagacagggtttcactgtgtagccaggatggtctcgatctcctgaccttgtgatccaccctcctcggcctcccaaagtgctgggattacaggcatgagccacggcacccagcctcatttgctgttaaactcatttattgagtcacctttttcttcctcacactttttagtattagaatttttgtgtgtttttatttaccctaacctgtcaatttcatagtttccactttcttgttgaagtttccaaacttgacctcatgcctttgaatatactaattctagttgctttgacacatttttttctttttccttggcatctgtttattccttctcacagtgtcttttttcttcattgaccctcacatctttgagcaaatgtacaaaatatagtgggtgaacaactggttttgtctgtctttagaggcccaactaatgttttctttctcaaatgattgctatttgctcatgccagaagtataaggacagtcaaattctgaattactttcataaaaatttggagttggaacctttttgggcactcagttggagagcagccagcctgctgtggtgactgggtgaattctggttccttctcactgctttaatgtaccagcagcttttgatatccatgaccaaactgggagcctctgcaagactagcagaggtttaacacaacctggtagatatcccatctgaagtaataaatggctccagggcaaagcagctcttatttctctaaatgctgtttctctccaaatcttagcctgacaattcttagctgtgcattaactcagttagtgttaaaaaataataataaattattacctcttatttattttattcatttatttattttatttttatttttttgtgatggagtcttgctctgtcacccaggctggagtgcagtggcacaatctcggctgactgcaacgtccgcctctgagaatcaagggattctcctgcctcagcttcccgagtagccgtgactacaggcgcacgccactactaatttttgtatttttagtagacacggggtttcgccacgttagccaggctggtctcaacctcctgacctcaagtgatccacccacctcggcctcccaaagtgctgggattataggcgtgagccactgtgccaggacctgatttgttttaaaatgttattttacatacaaaacctaatttaaattattctcggatatctaatctgtctttatcagaagcaaaagtctgacatttattcatcataaaaaatggtatttgaaattttctctcacttgtgttgttttgttgttgacctcacaaaattatcttataaaaatgttcttgattatgtctgataatattgttttgacaaataattttttctttgcgccattcttgaaacttttatattgtaacgttagatgaaaagaattaagaactatcttaaactggtgttagaaagcagtgcttactaaggacctatgtgttaaaagagaaatggcactatttgtcaaaatgtctacacaaccacctaatttgaatgtatgctacactgcaaataaaatgtttatatttataaatgtcttattttttgtcacagcgtagactgaattggagaaggaacaaagaaatctgtaaccggtgtgatcaatcagttgtaaacaccagcctccaaattacctgttattaattgttggtactgagcgttcacagtgaaatagaaccatcagaaaacatgggcaaataaaattattaaaaattcatctctatgatgtgccatgttctgaataggcagtttctgagtgtctgggccatctgtacaagaaagagagttgttatttggtcaaggacacgtgcatttttcagtctagaagaatgtcatcattttcttgaggtaattgcaatgttcctactctgtatcaaacagcaaatacctctgattcctaaggcaacagcatagttattatttgattttttccaagtgaataaaatgaaaaatgaaatgttgtgtcacaatcccaaaacactgctggcatatggaatagttgagatgatagaacatgatttgacaactccaaactgaaaatatctatccaagcagttgcactcctgaaaaactattatattgtctggcaaaagactctctcatgataggaaggttttctagatatttctagaaatagagacagggataaaactttatgtggccccaagaaaaggaatcagaattgagtattgtcaatgattgcttatgggcttgagaattaagaaaaaaaggacccctccccacaggtaccaacagttacataaccacgggtgccatggaactaatttgacatactgaaacaattttctataatcattcagatttctgacaaatcaaaatataactatcaaattcatacttatgttagttacaagtcaaatcttatttttaaaaaatccaaattctttgaagatttatcttaacaatgacaaagcaattgactgggaagtagttttgttaaccattcaattgactatttgacctaagaatgttgtatgtatatatatttaatttctattaaacaaatgaacatatttgtttataccatatagttatagtttgactttttttaagaatttaaccaaaaccatcaatcctgaagtatcaaactccagtgacttcagcaattctactttagaattcagttatttggtaaaaaatgtaagtaaaatattaataatttcagccagacgcagtggctcatgcctgtaatccagcactttgggaggctgagttgggcggatcatgaggtcaggagatcgagaccacggtgaaaccccgtctctactaaaaatacaaaaaattagccgggtgtggtggcgggcgcctgtagtcctagctactttggaggctgaggcaggagaatggtgtgaacctagcaggcggagcttgcagtgagctgagatcgcgccactgcactccagcctgggcaacagagcaagactatgtctcagaaaaaaaaaaaaaaaaaattaataatttcatggtaaccctcttcacttttttcaaaatcagaacaacaacattttacctttgctgattattaaggaatgttctcagtatcatctaatatttatgttcttgcaaatgcaagcactgaacactggtattttaaataacatcttgtttttaaaaatcatgtatctttcatgcatctgtaaccatctgatcaatgatcagaaaacggaaaagtcagtaagtatcactaggattctctcagagagtcacatttaattggctgggcccgtttgaatttccatctagaatcttctgagattaatgtagaagtaatcacggtgcataaaagcagcttaaaatactggacatagcttcagtatcagaacactttcaactatagtgtgacatgcacaattgctttatttttcttgaatattttcttttccacttggttaagaatttagcagattgtgcttttctggagaaaaaaaaacaatgttggaaaccaagttttatttaacaaaattaagtgatttaagcacagagagattttgaacttaattctacagtatgtgtttcacaacaaatttccttgtattaacggtacgccatttcatacacagagcaagttcgagcaccgcagaacacagctaattttgctaatgtatcacaattacagaaatagctgtgctaaatgaacttgtcctattttcatgaaaatgaacagtgttcaataaccctcaaaatattttatttcatgctgattcagattttctctaaccatttttttctgtgactttgcttccacaataacatagaatgtttttaaaaaggcaaatgtagtttgttttcatatatattttccagatattctttcttaagaaagcatggtaacttgcagttattaccatgcatatcttttttttggcaaaatgatataatttgttttaaaaagccaatccaaacctgtcctatgtgtatatagagtggccatgccgttaaatttgcacatagactgtcagtgactgaggatgacccaaattgcaacttcctgttttaatgttgcaaaggctgcctatgcctgatggtgtgtcaaatacccaaagcttgcatggagggacctaacaatggaccttttcacaactgtgtttccagaatctttattgactttacttcatagtacaataagatgaaaacaaaacgcaaaccgcctgatttccaagagcttatttaaaaccaaaaccaccatgtgagacttagttagcatagtacacattagatatggatgacatttctgcagtaagtcattgttttaagtctagtaaatatccagatgataacatctatttaagaacagcactgataattatatacgaggaggtcatgttaagtattccacaacaaattaaagagatgatgtccatgaagttatctatgctactctatataacagatggaaaaagcttgggtaatattcagtgcggatactgacttgtgttcctgactcataggcggtgctcagacacatttaacccactgtctgacagaataaatgaacgtgtcctgtaagtgaacccgttctgggcatgaggttaattattttctatatgagtacattaaatcattttcttttccaagggtaaatgaagccttcaatttgattgaataaaatacaagatgtgcaccaccatgcccggctaatttgtttatttttgtacaggcagggtttcaccatgttgcccgggctggtatgggactcctgagttcaagccacccacctgccttgggctcccaaagtgctaggattccaggtgcgacccactgcacctgtcctgaaagacagattttgcttaatttctacacttgatgttctggtacagacatttgcttggaaatacagtatagttagcggaagccttttcatggggaaataagatatcagtaagtattccaggattttaaactagaatacaaaagaagaaaatatttaaaataaactatagggtaatataaaatgtatttacatccttacatttaactgcttattttacaagcaataagttatcattcaccaattaatttatgtcaagttcacttgtattaatacacataaacttctatgaagttccataatgccaaataaaaaagcaacatttaggtttaacatgtattttatataggcataacgcaacaccagcattacaggattgcatttacaaattctcttgactctaagcatgaagttatgttaaaagactaaggcaatttaactgtttttgggtttttttatattaaggaaacctaaatttgtatgagtgaattaaattgaattacattttcttataggcatatcagtttaccctttgttaaaataacacgcactgccctacaaaatgaatgccgtagtcacaatcatgtttctgccacaatcttaaagatttggggaaacaactacaatctaaaatcagagactccatgtccaatgccaaaggtacacacctctatttttccccagtaagcctcttggaaaagtctttgaattacacgttaaagtgcacttcaaggaaatgtgatgttttcgtttatagctggtgaacagcatgcaatttgacagcactgtcactaacaatcagagactgctctggatctaagtactaaaaatgacccacactgcaatcacaagatatttggaagtggggatttattgaacaaagttaggccgggagtctaaagcagcacttgcttcttttgctccaagacgacgacgtttaacattagcatcactattgtttctttttccctcaactcttctcccacactgccttcttctccccccccaccttctcccatcgtctttccccgcttcccttctccctccctccgctcccccttcttctcccagcactcttctcagcccgtctttctgcctttctcttcccctccccacctcgttccctgcctcatcctcttctctcccaccaatctttttcccctctccatctctttccccaaggtcgtcttcgccgctttccactcccttcttcttccccccaaccctcttccctcctccctccccatccttttcttcccttcaccccttttccagtcttcttccccaccttctgctctttccctcccctctccttcccgacccttctcctttcccaacgtcttcccacctttttctcccctctccgtcttctcccctccttcttccccactgcggtcttcccgcatcctcttctgccgtctccctactgtcttcttcccgcaccttcttctcccccgcagtttttttttccccttccccaccgttttcttcccctcagtctctcccattcctcgcagcacgggttcctgtggcggcagcttttccttccatctccttctctccacccgctggcttccagtctccaccttcccgcctattcccccagcagcgtcttcccgccgctccctcttctcccctccccctcctcaccgtcttctcccggcctattaccgccaaccgttttcttcctcatcccgcacccttttcttcccatgtctgccttagtcttcttcccaccctcttctcctctccccatcgccttcttcccaccctcttctcctctccccatcgccttcttcccaccctcttctcctctcccaatcgtcttctttcccagcctcttctccattttcttgccgcctccatatccccaccttcttctcgcagcagcgtcttcctgccgcgcttttctctcccctcaccatcttctcttcctcttccccaccgtcctctccccacgccctcttctcctcactgtcttctccccgcgccttccccacaaccgttttctcccccgttttcttcccctcacaccgttttcttcccatgtcctcccaccgtctcgcagcagcgtctgtcagtcgcaatcttcttcccactttcttctctccccctcccatcgtcttttttccccagcctcttattctccgccatcttcttcccctccccaccttctcgcagcagcgacttcctgccgcgtttttctctccccgcaccctcttctcccctcttccactccccaccgtcttcgcccccgatcgtcttcttgcccacccccttctcgcgctctccaactgcctttcacctagaagcgctccacgcgtgcgcccgcctgtgtccctgcgcctggtgtgtctgtgcgcccagccagccccatgagctgggcccctgagctccgccccaacagccaacaggagacccaggagagtcgctgccagggccatcacggctgccgccgcccccgcccccgccgctacctcagaactgaacagtgttggctgcgggcgaaaggcagtggggcccggaagactgcggggagagggggaggaggggacggagagggtgggaaagaccttggaaagtgggatggggagaaaggtggggaagaagacagtggggagaaagtgcagggagaagacagtgtggtagagaagacagtggaggaaaacggtgaggagaaaggagggtggaaaagaagacgatgaggacaaggccgggcgcggtggctcacgcctgtaatcccagcactttgggaggctgatgcgggcggatcacaaggtcaggagttcgagacctgcctgaccaacatgctgaaacccagtctctactaaaaatacaaaaattagctgggcgtgatggcgagcgcctgtaatccagctactccagcgcctgaggcaggagaatcgcttgaaccccggaggcggaggttgcagtgagctgagaactcaccattgcactccagcctggatgacagagtgagactccatctcaaaaaagaagaacaaactacagcggggagagggcgaggggaagaagatagtgggggaaaaagagcaccgagaaagggagaagagatggggagagctctattgtgtcactgaacattcctcagttaaagttaaaatgttctcataagtttgtgtgttttcaacttttgctcttccagttggtatattcttttcttcctccatctcctttttatacctccaaccacctttctctttttattttccaatgtttttctttcttctaagaacattgttaacgctggtaacactttacaatgttgcaaagctctgaacctatttcctgtcatctcttcatgctttcccattgagatatcaggagattttccttttactttgtttacactaggaacatttcagcgtggctagacctgttttccacctaatttttttcaacttcaagcttgagaaacccaaatatgctcctggtttttgttgttgttgttgttgttgttttttgagacggaatctctctctgttgcccaggctggagttcagtggcaagatctcagctcactgcaagctccacctcccaggttcacgccattctcctgcctcagcccccctagtagctgggactataggcgcccgccaccacgcccggctaattttttgtatttttttagtagagacggggtttcgccatgttgccaggctggtctcgatctcctgacctcgtgatccgcccgccttggcctcccaaagtgctgggattacaggcatgaccaaatgtgctcctttaccaattgtttctgtctcaggaattggtttcttgttgcactgtgatacacatgaagccatatacctttttcagctcattatccccagaatgtatttgtacattattaacacagaatagacacctaataaatatttctaaatttttattgttcttccttgccacaaaaagcaatcacttttttttagcatgatgtacatgcccttctatcatgttgccctgaactatttatcaaatcttatttcttcccactcccccatttgtttcccatgctgtggctgtacaaaactacttagagctctgtcaactctccatgctattttataataatcaacactaatgaaaagaaagggggctttataacagaggcagaactcattatgttctaaaaaatacacgcatgtttcccatgttgaatagtgtcccgcagaaagtcatgtccagctggaacccaggaatgttaaactatttggaaacagggtctctgcagataacacttggttaagacaaggtcacaatgcattagggtgggctgtaaagccaatggctgtgtcctttcaggaaggtcatgggaacatacagagacctacagggaagacggccatgggacaagggaggcagagtctggagttacgctgcctacagtcacggaatgccaaggacagctggaaaccaccagaagctaagaaggagattttacctgaaagcctctcaaagaaatcaatcatactcacacctcctttttgaatttctggcctcgtgaatggtgaaaaaataaatttctgtcgtcttaagccccacggtttgtagtcatttgttctgttcctagccttaggaaactaacacagcatgctaagggaaaagaagaaaattctgcataaaatgtcattttactttttaaaacaactactgttgacagtaaatgagtattcttccaagattcatatgcagaacatatatgcagcccggaacattttttgggacccatggcataagtgattatgatcgataaaatccaaatattaacctgccaaaagagttattttatcttttgcagtcatttaaaggtaataagcagaggtcatgagccctataaaaattaatctattcatttgttgtcacttgatacttacgatccgttgacatatttaggttttaattctttgtacagattatggttcgtcttgcactgtaattttattgcacaacaaattttttatttatatatctaagttgtttcttaaatgtgaataacattgcacttgaaaatagaagacttctgtcgacgttctcgtaacagcttcttctagttaataaaaacctaatcccattttccttttatgtatagattacaagtaaaatcggcatttaaaaagtaaaatctgttcaacaatttctattgctattgtaggtagtataacataaaatgtgtcttatttttccctcactcattgacaatttaagtaaattttttaaaccaagaagctcttttcacataccaggcccagtgattggaattgagtattcagtattgaacagagcaaacaagtttcttatcattaagctcatattctatgttataaacatttttccagtgaaattactggaatgttttcaagcaatattgaattgtgttcttataatcacctatctccatttattgttgagaatgaagaaaattttggagcattcaattcaatgcaatgatttttttttttttttttttttttgagacagagtttcgttcttgctgcccaggctggagtgtagtgtcacgatcttggctcattgcaatctccacttcctgggttcaaacaattctcctgcctgagcctcctgagtagctgagattatagacttgtgccaccatacccagctaattttttgtttagtagagacggattttcaccaggctatccaggctcgtctcgaaatcctgacctcagatgatccacccgcctcagcctcccaaagtgccagcattacaggcatgagccactgtgcccggcccagtgcaatgatttgatagttattatggtggttttaaaatgacctgagtgaaatatagtgcttacatcaattccttatctgtcatgcatttcatctagtaatctgctctaactacattatttctttttattaaatgtcttgagatttaaaaagatgttttgtagttatactcaagcttggaaccatagtgaccaactgttacggacagactggattgtatccccttccaattaagttacggtgctgctacagaaagaaaagaggtgaactattttttaaaagcatttctccattggctttgaaaatgcctatatcatcatgaatagaatgttggtaaaattctgaaagctgaaggccattctggtgagatctcatatggaaatgagatgcagcttattagaaacaggaggaaaagtgatccttgttttaaagtggcaaagaacttggatgtatcatgttctaatattttgtgaaaggtagaacttgcaagtgatgaaattgtatattttgctgaggagatttctaagcaaagtgatgaatgaatggtgtggtttctctttaccacttatagtaaagtgcaagagaaaagagataaaataatacttaaaaaggaatcacaggccacatgcagtggttcactcctctaatgccagcactttggaaggccgaggagggcagatcacttgaggtcaggagttggagaccaccttagtgaaaccctgcctctactatttttgtaaacatacaaaaaatagccaggtgtgatggcatgcacctgtagtcccatcttctcgggaggctgaggcatgagaatcagttgaacctgggaggtggaggctgcagtgagctaagatcgctccactacacagcagtctgggtgatggagcaagagtctgtcaaaaaaaaaaggaaatcacagcttgaatatctgaaaaatcctcagcctgtctatattgcaaaacataagaaacatgttcggctgggcgcggtggctcacgcctatagtcttagcactttgggagcccgaggcgagcagatcaccagaggtcgggagtttaagaccagcttgaccaatgtggagaaactctgtctctactgaaaatacaaaatgagccaggcatggcggtgcatgcctgtaatcccagctactccgcaggctgaggcaccagaatagcttgaatccgggaggcggaggttgcagtgagccgagatcgcaccactgcactccagactgagggacaaagtgagactcagtctcaaaaaaaaaaaaaaaaagaaaagaaaaaaaaaaaaggaagcaagctgggtatctgcctttagaggtgttgtaccttttcagcattataaatgaatagagatgagtggcaatagttactttggtccatagatttttggtatcttaactagttttggatctcttccactaaagggattgcctgttgcacgttgttaggaatgtaaatactgaaggcaaactgcctgggtttgaattttgttctgtcccttgcaccctgcctgggttaaaatactagctctgcttattaagttcttttatggtgatgacctttgagcaaatgtcttagcttctgctttcccaagtaaatggacacaatagttgctaccttgtgaaagattcatgtaattgaccagtgtttaccaagcagcatcagtgttcagtttcagtcattggtgattccgcagttggactgtgagggggtgctggggtgggggtggtgtgtgtgtgtagcacttaattgcatgcggaaaggaaaagatactttttataaccgagaggcagcttttctctgcttttgtgtcaaaagggaagaagggagtttggagagggaaaccaattctctttaatactaagctctcttcttcaaaatcagaggtagatagaatgtgtaataatttacagaatttctagacttcaacaatctgatttttttaaatgtatttttattttttcaggttgagactgagctacagttaatctgtggcgacgtgctggatgcactggacaaacacctcattccagtagctgacactggcaagtccaaggttttctattaggaaatgtaggttctatactagaaaggaaaatgtaagattaaaagttggcctttttagaatcatgactttcttctatgtaggtttccaacttttatttaaaaataattgtttaatgttagaaggatagtcaatgttgggataaaaagatggtcaggctattataaaaaatgcattagcttttgctttacctatttatattcttttgctttcatgggacctatctcattcccctcccctaaacggccacacatttcacagtgctggctgaaagtttcatgtagaaattttattttatgattaatacacttgtgccatttcttggaaccacttgcttgtttaattctagtctatcaagtgataattttcttgatatttagaggctcctcagttaatttctgtgggatttttcgttatatttaataaggaaaataataggaaatagctaagaaaaaaagaaacaaagccaattattcctgagcgtgtttaaaattattgaagtacacttgttaatttttagtatagaacctacatttcataatagaaaaccttggacttgccagtgttagctgctggaataaggtgtttgtccagtacattcagaatgtcgccacagattaactttagctcagtctcaacctgaaaaaataaaaatgaattttaaaaaattcagattgttgaagtctagaaattctgtaagttattacacattctatgtacctctgattttgaggaagagagcttagtattgaacagaattagtttccctctccaaactccattcctcccttttgacacaaaagcagagaaaagctgcctctgggtcatcaaaagtatcttttcctttccgcgtgcaattaagtgctacacacacacaccacccccaccccaacaccccatcacagtccaactgcagaatcaccaatgactgaaactgaacactgatgctacttggtaaacactggtcaattacatgaatctttcacaaggtagcaactattgtgtccatttacttgggaaaacagaagctaagacatttgctcaaagatcatcaccttaaaagaacttaataagcagagctaggatttgaacccaggcagggtgcaagggacagaacaaaattcaaacccaggcagtttgccttcagtatttacattcctaacaacgttcaacaggcaatccctttagtggaagagatccaaaactagttaagataccaaaaatctgtggaccaaagtaactattgccacatacccagtttacttccttttcttttttttttttttttttttgagagggagtctcactctgtcacccaggctggagtgcagtggtgtgatctcagctcactgcaatctccacctcctgggttcgtgccattctcccgcctcagcctcccgaggagccgggaccacaggcgcccaccaccacgcccagctaattttttgtatttttagtagagacgggtttcaccgtgttagccaggatggtctcgatctcctgacctcgtgatccgcccgccttggcctcccaaagtgctgggattacaggcgtaagccaccattgcccggccgctaaactctttaattttcaattactccaattgcttgaaactcaaatagccatatggggctagtggccaccatttggacagagtgactccaacattccatgtggtgtaattttatttgctagcctttagcatcatgtaatgtgatcttcttcacttgttttctgtctctgtgaccagagcatcagctccttgaggtgggaattggtttgtcttatccactgctgtatgctggggctagaagttggcctggcatatagtagatgctcaatatgtaattgccgaatgaatgcatgagtaaatgaatgactcctggggaccatgaactctgaatttctccaaaaggaatgctagttctgccagggcttgctgctctgtgacctcaagtcaggatcttgccctctctgggctcagcatcctgaccaaggggcactggggcccctctggtcctaaggctcgagacttactgctgcttactctgtcctgttgggagaaaagctgagtgttgggagagaagctgaggcagggcttgcatgtctgctagacttgctgactccttgcttctagcactcccattatctcaagtagccacatgtttcaaagaaaatgctacaccatcgcagctgtagctcactcacttgatacattgattcctttaaacccccacagcctcaccacctgtttctttgtttgagcacaaataaatagcctgggctccctgtgtacccattgttctcacttaatacatgagaacatgcaatatttggctgtttctgcgttaattcacgtaggataatgaccttcagctgcatctgtgttgctgcaaaggacatgattttgttcttttttatgactgcctagtactttgtggtgtatatgcaccacattttctttatttaatgaaccgttggtggatacttaccttggttccatgaccttgctgttgtaagttatgctgcgataaacatgggagtgcagtgcctttttatgtaatgatttctttccctttgggtagatacccagtagtgggattgctgggtcgaaaggtagttgtacttttagttctttgagatacctccctactttttccatagaagttgaactaattgacacctaccaccgcttgctggaggttgaggacgcccagtgagtgtgcacccgggctggagaaggcaggaggtatggcccggaaaagagacacagaaaggtaatccaagagggctttctggaggaggtggcagctgagcctagaggtgaatttcgttggggaagagggagtgaggcctaggcagcttaggccatgacccccatagtgggagacggctgcataagggtctctctcctggcatccgtctttacccatgcctgggcatcctacccccatcaccctttaacccccgagggccttggctgggtcccagaaattcccaggagggtcagagaagaccacggggactctcatcacccccaccctggctcacttccaaaaaggctgcaagaaggatgttggagggtctcctggaggccgccaagggcattttctcatggagcccacgtctctccccgatcgtggtggctgtgatcggtaattccagcttcatactggctacaggtggatgatgcccacctggctgccgatgacttctgcaccaagtgaggctgggtctctggagctgccccaggggctggacaagctgaccctgcctggagccaacctggagatgcagcctgagaacctcaaggaggacctggtctacctgaagaagaaccatgaggaggtgagttcagctcagggaatgcagcagaaattcacctggaagcaagcgaggctggggcccagaacctccctgggctgggccatgcttccagtccagttcccatcctttatggatgcctagctctgaccctcagaggaccctgggtgaggcctggaggagccctcttctcaaatagacttcatttgtcccttgaggctcagctcactgcagttaactaactaatgagtaactcagtgtaagaacacacaatactaattactataattaattataatagtgatagtcattaaaacaaggaacttctgcccagcactacaagtgactcacagccattatctcaactgatacaaaaactgggagaaaggtactgtttctttcttttgacctgtgaagaaactgaggctcagagaggttaagggatatatctatggctgcacagggaccctccttcaggtctgtcggactcgtatccaccccacctctctgcccctctcctgcccctcctttccagaaggttctaggtcccagggactccaacccaaggatagagatccaaggtcctgccggggcggtcaggaggtcttacatgccctgtcctgtggcttccttctcagctgagctctgtgctgctctaagctgggggagcctactccctgagaagcaggacacccggaaggtgtttccccctggcgttgaggctggttatacaattcctttcctctagcagattaacatttgctaacagggcctggcgcggtgacagcagcgtaaggttgctttttgcatgcctgtgctgtggggttggtggtgggggcaaggcggtggtaggggcgaggccagggcagtgagtgaggtcgcccatggtcattctctgccgtgctggggggttgtcatctcttggggcttagcacttgttggggatgggtgaagtccagtcccgagtcacagtgtgtgttgggggaggttgctgatattcatagccctgtatgtttgagtaatgacaacatccatctccaccttcagggtgaggagctgttggcctatctgtgtctgtctgtctgtctgtctgtcatccgtacctgtctctcccagggagagaaggcaggccccagggtctttccccaggatggccttgggtgagttcctactgtcctctctgcccaggaaatgaacgccctttgaggtcaggtggacaaggatgtcagtgtgaagatggacactgtgcctggagtgaacctgagctgcatcctgaatgagatgcgtgaccaggacaagaaactggtggagaagagctgcaaggatgcccagggctggttcttcagcgtggtgggtggccgtgtgtaagcaggtgtgcacacgtgtgggcacatacgccgtgtgctggtgcagttggaacaccggcagattcacaggctgtcccagttggaaggacttttggaaaccagtcggaccagcccttcatgtcttcgatgtaaaatgtgaggctcagagaggactcaagctcacacagcccttcactgtggcctgcaaaatagatcccgttctctgcaagtctggtcttgggtttccaccacagctgtttacaggatgtgtgtatttgagtacatacacatacccttggcaagcacaggctgagtgtgtccggtgtcctagggacagcaacaggtgcaaaagaataacacccagtgcctgtctttgaggtgctgtagttcggtaggagtaagaaatgcaaacgaccgcagagcaggttgaattcctccaaggtccaacatgggtgcagagagtctttgtgtgcaggtgcttttggggccccatagaggccagggagggtttaggggatggttctgggaggcgagggctcaggaacagcccctttcctgtgccccacttgtgaaagtctccataaacccctgtggcccactctgccttccagagagaggggctgaactgcaaggtggccaccaacacagaggccctgcagagcggcaggatggagatgtggagctctacatctctgtgcagaacctgagccgtcccagctcagcaaggtagggcccctgtcccctccccaccctgtacctgtcaccccagggtgagcgcagccttatagacccctgcttggagaaccagagtccccacccagcctgtcccttcacactcagtggctgggtgcactaccacccaactgtgccggcagcacccacagctccatacaggaggggctcctctctagtgctctgccatggggaagggtcccacgtccatctcatcgcaccacctatctcttggcccacagaaagcatcgctggagggcagcctggtggagacggaggtgtgttacaggacccagctggcccagctgcaggggctcatcagaagcatggaacagcagctgtgcgagctctgctgtgatgcagagcaccaggaccacgagcaccaggtccttctggacgtgaagacgcggctggagcaggagatcgccacctacagccgcttgctagaggttgaggacgcccagtgagtgtgcacccaggtacctgctggggcgggctgggggcccacttcacccagggagaagttggtgtctgagcaccagcaaagttcaggaggtgtgaatgtgggaacctgtggggtttgcaggaggtgaaactgacgatgcaggctggagtctgactgaggagccttgactgccaagttaaagcgtctggactagatcacgtaggcaatggggagccatggagggatttggagcagaagaagggaatgaacatcaagatattttagaacattcactctggctacagagggagaaatggatcagaggggtcagggtggggccagagagacgcgtcagggggctagagcagggagtctggccagagaagtcttgcggggtggaggctgggtgggggggcaggggaaggaaggtggtgcacgcagaagagaggttatagctcaaaacagcaggactggatgcctggatctcagggtaagcgtggctcacggtcaggactcagtaagcgttgggtgaacacatatgaaggagtgggcattgatggccctgggtttctggttccgatgactgtgtgagtccatcagccacagggtgaagagcatggtgggtggtggtcgggtttgcagttgggaagggtgatcaggccttcagctgagtgtgtcctggagtctccatgcttagtcacacgttgcagctttttgctccccgaaaatggtgaagtccatctatagtctaacgacagtctctcctgctttaattgggtctatttgttgggtcctctgggacatggaaaaaccacttgctcagcttctccttgtaaattcctggtgagtgcctccaggcctactgctgtgctgtttctttttcttcttcctgctgcactgaacccctgccctttcattcttgggcctgtgctaatttctgtgcattcccaactgtgatttttcaccaatttaggggaacctcctctgccagggcctgcttctccccagcagtgcttgcaggggcctgggctggctggcatccctgggtcgatgggtgctcctctccctgcaggctggccactcagtactccttgtccctggcctcgcagcccacctgggaaggtaagaagctgccctgtcctgctgtgtggaccccaaggcggcggagaggctgaggacccttctgtgtgggagactggggggaccacagactcgggcaggtggggggaagagctcctgcctgatgttccctgtgcctccctcctccatcgcctgcagccacagtgaccagccaccaggtgtgccatcgtggaggaagtccaggttggagaggtggtcttctgtaagcaggtccatctctccacccactgaggcccctttctgcctgtgacagccccacctcgagggtcatggcacagccatcagctgcagctcccagcatgctactgccacgccccgagtgtccgtctgggcactggtccatgacctgttgtctttctgtatctactttctgcagcccctcactgaggaggcctcctgggtttgtccagtgcctgctattaaagctttgctccaagttcaatgcctcgtgtgatctggtctgttcattggtttggggcagtgtgggctgagggactgggataggtggagagtttattgagtgtttgggtattggcttgtcacctgccaatctgttctgcccactccatccaggcctggggctcctagaagaccagaggggaggaggaggaaggattaagggtggagggaagggacagccccttgtattgggaaaagtttctaagaatcagcccctgagtccctgtcacctgtggctggtccctgggagggccacacatactttccaaggaccacacctgttggggagcactccctgcctcagcccagggtgggttcaagagcagaaggagaggggctcggtggggaggggcttctgaaggagtggtccagggcactgatgagtgagggggtgagagcgaggcagctagcccaggaaagcagaccggctctgcccagctcggggtgtgtgtggggcagggtggccgctgtgcgtgtacgcatggggggtgtcctgtttgctttggtggcttggcagccactgggctattgaggaatctctctccgctgctggtggggctacctgggcctgtctgggaagtggaagccattggcagtctgaaacatgaccaccttccacccagcgggcctggcaggaccctgggacccagggcggggcttggggtggtgggcagggcagggtggggctgtggagtggggcacttggcccgcccgaggagccacatcttggggagcctggagtggggagggggctggctggctggggtctctgtaagagcctcttcttgggcaatgtcctttaggtttcctgtgggctgagacctgagagaaatgcccctcccctgaccctgaggtctcttggggtacagaagggtgagaggagtggaagggggcatccccctctcagttggtttagatcctctcttagcacggcccacctttcccccatcctatagctgagcccctgtttgcccaccccagcctggagtgtaaacctggggaaaggtttacacgaggagactgggttagcaagggcttctagggatggggcagggtcagaagctgactggatggaactgtagcccctagagtgcattcctgggtgtcagactctgcagaaggggccagtgtggacactgcacccctctggagccccaatttctttatctgcgatgtgggttggtctccgaggcttgatggcatttctatgctgtgaggtgggcctggtgggtttgggctcagtttccaaggcaggataggctctcggtcccttctttctcttcagcacccagccccgggccagcaccttgggtggagcagtgtggggtgaaagacagcaacttcagggggtggtcacctgacattgcaacccatttccccaccagacagggttgaggtgggccgggctggggtggtggctgcctgggagggcctggggacggtgaagtcctgtattctcctcttctcccatattaggtcatgggaaagcatagctggagggcccgcccaaatcacaggtgacgggcctcagagcagtggcacgcacacgcgtggcacccagcacgaggatttggagaaatgaggcaaattcctgatgatgggtggggagggggtccccagccacctgggagctggcaggtggcccgtggtgatgaaagcccaggggaagggaaacagaggagcctgttgtaatcgctacgcccacttggtggcctataaaggaagcctgtgaaccccggcagccctacactacttggggcccctcttctttccagcccttctcctgtgtgcctgcctcctgccgccgccaccatgaccacctccatccgccagttcacctcctccagctccatcaagggctcctctggcctggggggcggctcgtcccgcacctcctgccagctgtctggcggcctgggtgccggctcctgcaggccgggatctgctggtggcctgggcagcgccctcgggggtagcagctactccagctgctacagctttggctctggcggtggctatggcagcagcagctttgagggcgttgatgggctgctggtcggaggtgagaaggccaccatgcagaacctcaatgaccgcctggcctcctacctggacaaggtgcgtgccctggaggaggccgacactgagctggaggtaaagatccgtgactggtaccagaggcaggccccggggcccgcccgtgactacagccagtactacaggataatcgaggagctgcagaacaaggtagggcctgctggtgggaggggtctccggggggcatgactttttccccccaactcctgccctggccaaaggcctggagtccagccatagggtctcagggagccaagggtggtttggctgtggcttagcttctgggaacctgccttggggcccctgtgtggcccacatcccccttttctgggggcagtaggctgagtcaggaacaaacaggcctcgtggagccccttggagactcagtttctccctcgtggagctcctccacctggagaggttgtaggatgaggcaggaggatgcagatggagggctgggcccatgggccactggatgcgtggtgtcttgctcctttggagcaggggtcagcaggaaggggttttgggaggtgtggagtgggggtgtctgagtgagctcccgatagcacctgctgcgggtgggaggcagaaaggagggggtgggacctcagggtggggaaggcctctgatgtgccttatttggggatttttctggcttctcctttcctcctgctgtcccttaagacaggctcagcaaaccgcagggggcggggctgctggctggagcccagggttagggattaggaagggtcctgacttctgatttgggaccactctttggtgagggctcctttagcctccttttgggggagcctgtcaggggcaccctctagctgactgtaaaacgagggggttgcccacatcccctcccttgttctagaattctgggacagtttctgccctggggacattttccctttcttttctggttgcctcatactcccagccagctgtctcttctcctttaaggctgagcctggcatgggggtctggtggggtactgagtagcgggggaagaagaggcacctttgagcccttcagactcctgcttgcccctcctctgccaataatacagcacggggcaagggaggggctgggcgggaagagaggcccccaggcaggaagatctgttcagaactctggtgtgggctcagccacccccatccgatgacctgactactctcccatctccgctgatcctcacagccaccgtggacaatgccaacatcctgctacagaatgacaatgcccatctggctgctgctgacttccgcaccaagtgagtcctagctgtgggcttgggcagcctgggtcagctgggggaggatctcagggtacccctcctgaccccaggactccttggttgcttgtggcaaggcccaggagctcagggtggggcaatcctaggagccccactacttagtccaggatgcagtgaaggcagccagttctgaaggttgctgggcttaggcagggaatagaagagagggaggggaggcaggaggcagagagaagtaaggaagctggtgggcgtaggatctggccctgtgatggtcccaaggccccggggctggaattcgtttccactcgaccctctcatcagcccttccaaccccttagagtcctggcaaaatgaaggcaggtgagcagccaggacctggacctgcaattccaagcagcctgggctgaagtccctgattcccatggcaggtttgagacagagcaggccctgtgcctgagtgtggaggccgacatcaatggcccgtgcagggtgctggatgagctgaccctggccagagccgacccggagatgcacattgagaacctcaaggaggagctggcctacctgaagaagaaccacgaggtgaggtggctggggcagaaggtcaaagatgctgaggagtgggtggcagagccctggggctgggccatggctgaggccgtgcgagagagcacagcaggcgcactgggattagtcaccttagagggcttccctgtctgcggagccctgatccttggggtccagcgtgcagggcagactcctctttgtaccacactgcttctctgtacccaaggaacctcccaggggcccgcagaggctccctctacctgccctggcctccctgatgagggcaggggataagtaaggaagtctccttcttgtcccatttcaaactctcaaagctgaacatctacacagaagcttggaaattagaggggaaatttttggggcataggcctaataattagattttattttggagagcccttggtctaatgggggagatagagtctgatggtggaggcaatactgagcagatgaataaaaatcatttagagggtcagatagagcagaggaagaacaaaggaggggtccttgtggggaatggggtcacctcgtgggggaaggcttgggagtgagagatcaggatgggtccagatgcgcacatccacatcccctttttccataggagatgaacgccccgcgaggccaggtgggcggtgagatcaatgtggagatgggcgctgccccaggtgtggacctgagccgcatcctgaacgagatgcgtgagcagtatgagaagatggcagagaagaaccgcaaggatgccgaggattggttcttcagcaaggtgggagctgctgcaggccagaggtctctcttcggggctggggctcaggggccttagcactgacagtaggcccacggacaggtgtcttggagatgctccctcctcagcaagctgcatggaccacagggtcacccactgcatcaacagacctggagctgagctcaagctgggatctggggggtgagtggggagctagggagcccccacagaataaaggcagagggtaaagaccttgggagtccccacctctctctcaagaagtcagaaactagcaccaagagccaggctacatgttctggctggttctcaagtttccggtctgtgcctcccacacgcagggattaaccataaaaagttaacatttcaaatggcatgtttctgggctttgggacgtgggaagctggtgagaaggcatcactctgtccacagttagatttgggaggaggcctgactgaggagagggatccaggctcacaccaccctgtcctgtgttctgtctgcagacagaggagctgaaccgcgaggtggctaccaacagtgagctggtccagagcggcaagagcgagatttcggagctccggtgcaccatgcaggccttggagatcgagctgcagtcccagctcagcatggtaggaacagtcctgtgcatggggatgggcccagaagaggacactgacaaccctcactgacccctggtcttcctgccctcctgcagaaagcatccctggagggcaacctggcggagacagagaaccgctactgcatgcagctgtcccagatccagggactgatcggcagtgtggaggagcggctggcccagcttctctgcgagatggagcagcagaaccaggagtacaagatcctcctggacatgaagatgcggctggagctggagatcaccacctaccaccgcctgctggagggcgaggatgcccagtgagtgggggagcctggggtcagggctgggggcctcttggcaggggtggggctctcagactcacatctaatttcctctctgttttttttttctttcagcctgactcagtacaagaaagaacataagcatcttggtggctgaggccttggggattgggtgcatgggacaggcagcccacctgcacgttgctggagctgggtccccaggagttctaggagttgatggctgtccctcagcaggggtgggagaagtgacccgttagcactgaggattgatactcaggaaaagatcaaatgagagagatgctgtctggtctgatggggtgggccagggaactggtccttaccttggagatcctagtctgatggaggagacaggtcccacctctggagattgtcatctgatgggaagataggaacatggtctcatgatctatgctcttgacagcttttggatgagcgaaagcagtcctgtctctggggactctagcctgatgggaaatagggacatgctccttgtcctccaaattccagtctgatggagaagatatgatgctagccccagggttcctagtctaatggaggagataggggcctggtttttgtcttggcgatcccagtctgatgggggagatgggagcaaatctatgccctggagactgcagagaaatggagatggatttcatggagtctacatggctcctccctggcaggacacactgggtcagaatcaaataacccatctgcggaggcaagactcacacagggccaccggcagagggatgggatggaagggaggcggtggcagggacaggagggatgtgtgtgcagtgtgatgttgaggtgccagtggaggcactcacagcacctgggggaggacgagggagagagccggctcctgtccatgagggctagggggcaagcgagggcctcctggcccctacccactttaaattgcctgcttctcctgcagcggtgaccacctgtcaggtgcctaccattgtggaagaggtccaggatggtaaggtcatctcctcccgcgagcaggtccgccagaccacccgctgaggactcagctttcccggccggccccccaggaggcagggaggcagcggtcccatctgccccgcggtctccggcctctccaccctcagccccctgcttcagtcccttcgccatgcttccctgcgtgatgacaataaagctcgttgactcagctatgaaatgtgtccttgttctggccgctgaagtgggcactggggacaaaagggtgaaatgggaaggagtgagggtggggggagatggtgcgtggagaccccgttgttgactggcaggtcagaggtcagcttagaccagcataaagagtaagtctggggagagtttggaggggggtgctcgcatctcccaagggctggagattttcagggggtggtccaggctgcgctagacccggggtggaggcggtgtatcaggtgtggtcctaggtcgccactgcttgccctgtgagtaactctgtgacctcgggaagttaggcagtcacttcccctgactgagccttgcttttccatccgtaaatggatgggaagatctcaggtgtgggagcccgaatcctcagagatgactcactcaatcagttgctccttcctgtcctgtgggctgtgccctccccctagatggggcaggaggtgggcaagggctgggataagcacaaagggagggtgggtgggggaggcaggctgggtgattggggccccgactcctgtgtgagtctcaggaaatccccaagaggggctcccattgcctctgccctgggaatgtgagcgggagggtggtgttttcagggaaggctgcggaccccaggcaggtatgggagaaagggtggggcctctctcaaggatgtttcctcacatggtcagctgttgctcaggatgcggacagggcagagtggggggcactgcagatggggtggctgtgcccagggagcagtgccactctccctggcggtctggatcctctttggttccccactagggacaggggtggtgtgagggagggtagaaactgcctcctaggaaaatgagaaggaacagtcctgctccagccactcccggcaccctctatgagctgaccaacgccagctcttgctggtggcagcaaacgtggctgtggggagcagtctgtgggaggtgagcctgacacctggaaatcttccttgtagtaaatctggaaactgccaggtgggttggcctgctttcctggttttcttcaagcagggggttagtgggaggagggtgcctccacgtcctcactgctggacctgtggtgtctctgctgctgcggaatcagaccaaggcccccaaacaccctctctctcctggtgcctggaggctgggggtggggcccaggtccgaggagaatgggagtgaccagagccctctgagcctgggttggtgggggtttgggactggcagaggccagggatgggggtgggtactgaccactggggtatgggtgactttgggctggtcacaagccctccctggaccttggagctatgacatcccgggagagtgtttctctctgcagggtagatggctgcctggagtcggggacttgcacctgcagcggcatctgcacgactcaaagcaagggcaagctctgctccgttggaggctgacgtctccctgctctctggcagcaaatgtggggccatggagggcaggagggaggcactgtttgcaccaggcccccaccatacaccccgccacaaccagaagaacagccctgggctgcagatggctcattctggagggtgacttcatttgtctgaatagtccccggaagcagggagggtctaggggaaggcgccttgttgtgtggatggggacactgaggctccaaggagcagtgactcagcccttgtcccacagcctgaggggtcagtagtggagacgggcacgggaggggagtgggccccgcttccgtgctgggaagaggagccaagccccagctcctcccccacctcaggctccaggcagggctatctctccctcctgtagagcctggggtccacaattactgatggcgtgagtgaggaggggtcagagtgtgggaaggaccagagacagccccagactgtgcccctctgctggggaagaagcccttctccacaaagtgagtgggtgggaggctcaggaggccagaatgggggagccccccggtgtgcccagagagctgagccagtagaggcagtggttgccaggggctggtggggagacttgagtgactttgtccaaggaccccaagtgggcccaggatgctggggacatgtgcctgggctggattggggacccagctatgggactcaaggagggactcacagttcgtccacacactccctgcccactgcacagaatgtcctcaaggcagaagctgcggatatgtggttaccctgtagagctgccacacctggtctcgtgtgatggacacacatataagactctcaggccagacccatgccagtggtagctgcctccggaccccccttgcaggggttgacctggcagcatgtcttctacggagacggatgtggtgggggacactcatccatggcatgacatcgctctgcgtctggtttgcactgagtccagggaaaggaggagacaccggtcctgaccccaagagacagtgcctgccccaaggggacctgagggactgacaacagtccctcagcccttatgcagtgtgggtctattgtggcaaccaaggttttggggagatgaggggaacagagggagcagagccaggcaggtctccccacatgcacagagccgaggggataactgagcttgacagagacccgtcctcaccctgagctgtagtgaccatttgaagaaacatccctgagagaggcccactctttctcccacaacccctggggtctgcagccttccctggaggcaccagcttcccgctcacactcctggggtgggggcaatgggagcccctcttgggggtttcctgagactcatacaggagtccgggccccttgtttgtgcagaacaggcaccccaagtgggtccaggctgctgaggacatgtgcctgggctggactggggacccagctatgggactcatggaaggactcacagttcgtccacagccaccctgcccactgcacagaatgtttcaccccatcatcaaggcagaagctgcagatctgtggttggattgtgaagggctatgacagccccaccttcagaaggggggcgtcaaacttgcaggaggggagaggacccccgaaggtgggcctggcactcacagatttccccagatccctggagccgtcacaggggcagagcctgggcctggacattcgttctcccccaggaaccctgctccctctgtttctctgcagggccccagcaccccatcgtggcctgactttagtgtattgggattgtctttaccaccttctcccccagaagactatgtctccagggcttctctgtcttgttctttgagtctgagtgcccagcacagtgtcaggcacacagtaggtgctttataaacacctgctcataaacataacgctagccaccagcctttgccaggtgctttatttatttggcctcaaatcccctaatatgcctgtgacgcagggctgttattcccatttcccagacaaggaaactgaggctcagagaggctgaatatcctgcccaaggttttgcccctgcttgccccgattccaggctgctctgtcctggctcagtggggctctacttttccttcctcctgccctgaagcctgtggctctggcttgtccacccagggctgggggccctgcagcagccccctctctcccctcagcttctctgcccccctcctcagccccctaagctgcctcctgccttcccagtctgagttggctggggagcttgtaaaacagccccaccagcaggcttgtcctgagtggtgctgatgcaggagttggagcagggctgcgaatcttcttggggactctgatgatctgtctggttggagaatcactgcaagccaaggcgtggcattggccaatggtgattcccggcctcctcaggtatgctatgatctccgcctcatgcttgacatgggcaggacgaaggagggaggaaggaggcagggtgcggggaggaatcctctgcctggaggatgcccactgggcttctctatgctcaccaggcttagaggtcctggctcttggccaccttggggcaagtgtgcatcactgatgcagaggaaacgcctcctcctcttctgtcaactcagatcctctgaggccctgctggtgcctccctctgctgggaccctttcagggatcaaggccaggagggcagccccctcctctactgctgaggctcagcggggtaatgcttaccccagctgcctccggtggtgtgggcgtggcaggcaagcccagcaccctagggtttctagccaggttctgcattttccagcgttagttttccctccagggtcaaatgataagttcttctaaggtcagagactacgtcatcatttccctcttcacccccagcccccgagagctgtgcacacagcagctgcgtgatctatggagttggctgagcagtttggcgcgttggtcagcaacttcctgcagcttctcagcccacgcagatcctcaggtctgcagtgctgggcttgtgtataatcccaccctgacacctcctggaatggggaacttggcggggggcagtgagccaatgagaaaggggtgtgtgtgcacgcacacacggtgggggcagagagtgaagagttctcggagactccactgtgagagtcggtgtgaatcctggcttgggagttggagctggctccggtctgtgctctctcacttttgtgctgcttaacctggataaggctttcgccctctccggttggggtattgatagcctttggtgaccttgaagaccattttcagttctgagggtgatgggtctgtggttggactggaactccaggcccaccctgacacctgaacgctgaggtttttgtccaagattccggggtcccctttgtccctctttggggtgggggtgggtgtggggaagagagagatcagtgtctctttctatacggactgtgtctatatagaaagaagtagacatgagagactccattttgttctgtactaagaaaaattcttctgccttgagatgctgttaatctgtaaccctaccccaaccctgtgctcgcagaaacatgccctgtgtcgactcaaggtttaatggatttagggctatgcaggatgtgctttgttaaacaaatgcttgaaggcagctagcttgttaaaagtcatcaccactccctaatctcaagtacccagggacacaaaacactgcggaaggaaggccgcagggacctctgcctaggaaagccaggtttctccccatgtgatagtctgaaatatggcctcatgggaagggaaaagacctgaccgtcccccagcccgacacccgtaaagggtctgtgctgaggaggattagtaaaagaggaaggcctctttgcagttgagataagaggaaggcgtctgtctcctgctcatccctgagcaatggaatgtctcggtgtaaaacccgattgtatattccatctactgagataggagaaaaccgccttagggctggaggtgagacatgctggcggtaacactgctttttaatgcaccgagatgtttatgtatgtgcacatcaaagcacagcaccttttccttaacattgtttatgacacagagacatttgttcacattttcctgctggccctctccccactattaccctattgtcctgccacatccccctctgggagatggtagagatggtagagataatgatcaataaatactgagggaactcggagactggggccagcgtgggtcctctgtatgctgagcgccagtcccctgggcccatttttctttctctgtactttgtctctgtgtctctttcttttctcagtctctcatcccaccccacgagaaacacccacaggtgtggaggggcaggccaccccttcaggtggggagtgtcgggttccctctcccaggtttggctctgaaggcatgtgcatccattctgctcttacctctgatcccagagtgaccaggggagatgtagcagcaacaaaaccctggttctgctgagacaaggaattgcctgccccagtggagcccaggcagaggcaggctgtctctgggctcctcacctcaacagaggcactgcagagcaaggccagtggccagcaccaagggatgccccacggcaccctgaggaggccccgtcttggtgcccagatccctcctcctccctccagtcctcggtgctgcaccagcctctcaggccaaggccacgcccaccctgggcagacctcatgccagtgatcgtggggaggtgggtgagagttgggtatactggccccgcctgcaggcatggtgggagcctggagagggctgaggtctgggttctagttgcagctctgcagcttaaagcagagtgactttgagtgaatctccacctgtctctggttacccctctgtcccctctgatcaagaaaatgatataaatttgagatgcacagagagagggctcaggatgacagaacaggcttaggcaaggagaacaggcaggcaggttcacatctcagcttccagtgcctggtgtcttgggaagcccacttatcctccctgaatcccagctccctcacctgaggactggtggcaggaataacgcccccgtcatccctgctcacagaaccgtacaacacacaccaggctctccatgcgtgcctgagtgggcccatgaccggtgctctcccccagctcagctggatgaatggagctgccaggcccagcgtgggatctgtggacacaggagagagaactgctgggaacggatccccagccagtcctgtttctacagggtaggggggaactctgaggcccacggcggggtcaggggtcacacttggctgcagtggcaggacggggctccctcccaccggcctgcaggtggggtgcctgtgattaggagagggcggtagaggagtggaggagctaggtgtggggctgtggtgttcttctgctgggagtgtgggggacgcagggccccgcgtagcggttcgggagggtgccagtgtgtagaggtgagtgtgaggagcaggtggctggagggggaggatgaggaggatgaggggcagggctggcccttggggaagggccagtggggcgcttcgcacatgtttctttgtggctagtggtgtgtcatccccttttacagatgagaaaactgaggaccaaggggctgtaagaccagcctgtgctgtacagctggtaagggcagagcagggactcagtgccgcctgtctggctccatggccagtgctgtttgtatggtgcacacacttctggagatcccgggggctcaaggcagcctccggaactggaattagatccaagaggggaaagagagtcataggatttttagaaccagaagggactctgcaatcacccagtccagcctggtcaccactgaggggaaacaggcccagaggtgggaggtggggagcctcaggccacacagcaagcagagtgaagacacgaactctgcccctgcccagagtgggacatgtaggatccccgcaactgctccccaagacagcccaggatggcatcactgaggtctctttcagccaaggctgtcactgtggggcagggagttcttctgaagggctgactcactgcctggggacgcagttgccacaaagccacctgtgccaaggccccactggccccaagggctccaggaacgggagcctgattcccggccacctagcctgagtcaccaccgactcgcatttgtgtgtttttctctcagctccacactctcaaagctgggtgggaactctgagccagcacacagcggagttgatcctgggctgaataatccagagtgaggagttggacgggactgggagtgatgaaatccagaggggaacctggagtcagcagttaggagggccccgccttccccaggtgcatataaaggtctctggggttggaggcagccacagcatgctcttagccttcctgagcaccttcccttttttcagccaactgctcgctcgctcacctccctccttggcacgatgagcacctgcagccaccagttcacctcctccagatccatgaagggctcctgcagcatcgggggcagcatcgggggcggctccagccgcatctcctctgtcctggccggagggtcctgccatgcccccagcacctacgggggggcctgtgtgtctccttctctcgcttctcctttgggggagcctgcgggctggggggcggctatggcggtggcttcggcagcagcagcagctttgctagtggctttgggggaggatatggtggtggccttggtgctggcttcggtggtggcttgggtgctggcttgggtggtggctttgctggtggtgatgggcttctggtgggcagtgagaaggtgaccatgcagcacctcggtgaccgcctggcctcctacctagacaaggtgcgtgctctggaggaggccaacgccgacctggaagtgaagatccgtgactggtaccagaggcagcggcccagtgagatcaaagactatagtccctacttcaagaccatcgaggacctgaggcacaaggtgggtgactttggtgtatggagcactgagagaggctggggctatagtgtcccttgggatacctctttttagcaattgcactttacaaacagggagactgggcacctttggggagtagccaggatcatccagggaagtggtggcagagggtcccttttcagcatctctgtgcccggactggggctgttaccctgaatctcttatttcctgcaagggttcagctgcaagttccgcttccctgccttgggcccaggaagggggtgatcgggatggagtgcatccctgcataccctgagctggtggagaaggcatgccagccctgccagccagaagacttccagatttgaggaggttccttttgcccctttctgcctttcacgctcaagtagtaaggtccttgcctgaccagggctcctgtcctccatccccactccagatcattgcggccaccattgagaatgcgcagcccattttgcagattgacaatgccaggctggcagctgatgacttcaggaccaagtgagcagccagcatggtgggctgggggcagagggcaagggacaaagagtggagctgtccacccagcagggccagcagaccccgagcctcagaatcctcagggctgcagcctaaggacctgacctctgtcctgccagttaggagcacgagctggccctgcggctgactgtggaggctggcgtcaatggcctgtgccgggtgttggacgagctgaccctggccaggactgacctggagatgcagatagaaggcctgaaggaggagctggcctacctgaggaagaaccactaggaggtgtggttgctgctggcttccgggatgggaggctggtttggtggggttgccagatgcacccagggccaggagaggagtctgctgagctgaccgcctcctgccatcccttcccaggagatgcttgctctgcgaggtcagaccggtggagaagtgaacgtggagacggatgccgcacctggcgtggacctgagctgcatcctgaatgagatgcgcaaccagtacgagcagatggcaaagcacaaccacagagatgctgggcctggttcctgagcaaggtggggcttgggccctcagtgggcctgcagcacttcccagctgggggctttgggagagcctcacctttcactctgctttcctgtctcagaccaaggagctgaacaaaaaagtggcctccagcagtgaactggtacagagcagccgcagtgaggtgacggagctccagagggtgttccagggcctggagatggagctgcagtcccagctcagcatagtatgaaggacccggcacagcagcagcccccaggtcaccagtaatggccaccaccccctcaacaagccacaatttagttccacctttcttttctcaggatgggaccagaggactcacgggacctgttatatagatagagaaactagccctagaatagtgggctagcatttctctatattgtctggcccatcagtaccccaactgggatcaaaatccaggcacctctcaaaaaacatgcccagagacctggagggacaggagtgaccacctccattgactctttttctctctctcacttgcagaaagcgtccctggagaacagcctggaggaaaccaaaggctgccactgcatgcagctgtcccagatccagggactgattggcagtgtggaggagcagctggcccagctatgctgtgagatggagcagcagagccgggagtaccagatcttgctggacatgaagacacggctggagcaggagatcgccacctaccgccacctgctggagggcgaggacgcccagtgagtcccaggcccctcagttctgcctcccagaccctttagcccccctgctgctctcagcacaactgactgccctgccttttctcacccacagcctttcctccccacacgcatctggccaatcctgttcttcccgagtgggtaaggctcctgaggctccccggcactgcaacccctctgcctgtttccatggagtgggggccaggcccttctcctgagagctcccagctctcccttctccctgccctggagttggcttagctctcagaccccttctcacctcctcttctctctcccacagtcttcacctcctcttcgtcctcttcgagccgtcagacctggcccatcctcaaggagcagggctcatccagcttcagccagggccagtgctcctagaactgagctgcctctaccacagcctcctgcccaccagctggcctcacctcctgaaggcctgggtcaggaccctgctctcccagcgcagttcccagctgtctccctgctcctctactggtgatgggctaataaagctgactttctggttgatgcaaacctgtgtgatctctgttcttgaactgatgggaggggagttgcaggtgctttccagaaacctcctggagcctcacagcctgagagatgtgggaaatgggacaaatctcagaagatcttgaaggctcttcctggaagacctccatgctctatggaagtgggaggtgggacacaggatgggggagtgtccacacgtgctgactgacaccatggaggcattctacagaggttattttacgaggttgcccttgcaaccctgtgaggtgggtgtggtcaggcccattttggaatttgacaacccccagaattcagagtttcagtaacttgcgtaaaatcatgcagatagtaagtggcacggctggagctcaaactcagttctgtctgtctgcaaagtccatgcctttcttttaacaccactctaccttttcaggtattttaacccgaagactcccacgcttgaatcttaactctacccatgggctcccccacatctgcacacagtttctacattggagggtggaagggagtggtatctgccttgagaacgatgtcctcgtcagacctgaaatcctccttctcccagcctgcttctcctcacaccccatcaactcctccttcctcattcccctcagctggtgaattgcgtgctgatgagcaccctaggaaacacctgctgccccatggccattgccatgttcagatcttcttcctctctccctagacctgggcacagcctaactgggtccccttgagagtcaatctcatccacattcaatttccactgaatgatttccaccagaatgtggtcaggatcaagaacaagggtgagatcaggactcccctgcttaacagccggcgatggatcccattcccctccagcactcagccttcagtctcaacccagcttggtgtcctcctgtccctcccagctccaaacccccgagtcacccctacctgactgagatatgacccatacctctcagttgccattccttcttcctggatgccttccatattttaaatatttaaatttaaaaaagttatgtatgtataacatcataagccttttttttttttgagacagagtcttgctgtgtcgcccaggctggagtgcagtggtgcgatctcagttcactgcaagctccacctcccaggttcacaccattctcctgcctcagcctcccaagtagctgggactacagtcacccaccaccatgcccggctaattttcttttgtatttttagtagagacagggtttcaccgtattagccaggatggtctcgatcttctgacctcgtgatctgcctgtcttggcctcccaaagtgctgggattataggcgtgagccatggcacccggccaagacttttttttttattattatgctttaagttatagggtacacatgcacaacatgcatgtttgttacataggtatacatgtgccatgttggtttgctgcacccatcaactcatcatttacattaagtatttctccaaatgctatccctcccacagtctcccaccccctgacaggccccgatgtgtgatgttccccgccctgtgcccatgtgttctcattgttcaactcccacctatgagtgagaacatgtggtgtttggttttctgtccttgtgatagtttgcttagaatgatggtttccagcttcatccatgtccctgcaagggacatgaactcatccttttttatggttgcatagtattccaaggtgcacatgtgccacattttcttaatccagtctatcattgatggacatttgggttggttccaagtctttgctattgtgaataagacttttttttttttaatgaaaaagccatccctagactggataccacagctctgttcctgcctccccttttcaacttcagctgtttcttttgggatttgtctccttacttctaaataacaggctttaccttgttactgtttggtttttctgtttcagtttttaattgcttgacttctggctgtgaaggatgaggatgtagatctgttatacagcattgcccttccccacttctttttaaaatatcttcttcccaccttctcaatatattcatatttttgttaaataaatgtttacattatcatgactatttaaatgttattcatagtcaaatcatatattatactatattacattttatactatattaaatttccttggaataaatatctctttttcaatttgcctaaactttctatgtattgatgattaatttgtttcctgattcactgctggaagcataaatctcctcagtattttagaaccctgggtgttccttcaatttcatcctcatgaagatgtgtctcctagggccttctgtcctgctcttgtctgttctgggtgctgtttgggtctcctgctcagctgtgatcctggaatctctcttcaccatcatcctgaaatccttctttttcctgtgttgctttccttgttttctggatccaatgtcttcctccttcctgttttcatttttccctttgttttagtgaagcacatcctcaagtagtttcctgggaagggagttatcagggttaaatttttttagaccgtttgtgtcaaaaagatctttagttgatcctcactcttgactgatagtttggctgggtatggaattctagcttggaaaccatttgcactcagcatttgaaggtacagtttcagtgtttcttggattctggtgttgctgttgagaagtcttatgccatattgattctagatcacgtcttattatcctattcccacactcttccctagaagcttttcagttcttctctttctctccagcaggctgaaataccatgtgttgaattgatgcagctgtgacttcatccactggctggacactagcagaaacttccaatgtgggagctcatgttgttcaattctggcaaattttcgtgtttcatgatttcctccctccattttctctctttctgaaatggctctttttcctatgtattctgttttattttccgtcttgtctttttttctttgttgctgttttctgagaaatttctttaactttgacctctaactccattattcagagttttaaaaaatctgctgtatttggccgggcacagcatctcatgcctgtaatcccagcactttgggaggccaaggtgggtggattgcttgagcccaggagttcaagaccagcctgggcaacatggtaagaccctgtctctacaaaatatataaaaattagctggatgtggtggcctaggcctgtagtcccagctgctagggaggctgaggtgggacgatcacttgagcctgggaagtcaaggctgcagtgagctgagatcacaccatcacattctagcctgggcaacagagtgagatcctgtcttaaaaacaacaataatcttttatatttttcatctctcatagctctgcatgttttttcaacagtctcttgttcttgtttcaagatgcaatggtttctctgatctctttgagcctattagtcctggctccagcagtgcttctatttctgtcatcagctcagtttcctcagtttctttcttgctgtttgtcttgcctccatctttcatgccagaggcttttctcagatgtatggtggtccttggtagtcgttcatatttaagagtaagtcactgagaaactgattggaatatgtgtatatgtgtatggatagcatgggagcttgccactggtaggtctcagtatagagtaatctggtggagaataagctgtttcgttgggggacagttatctgtaggacttttcttggggagggtcttcctcagaaggaatacctctaattccctgtctggattgtaaaagctaccagctttctggaagctgagtgcaggaagggggcagagaaggtctcagtctcagctactctgctactagttgattgcagtttattggccctgcttggtgtctcaggattcagagtccctctggggaaattctcaagcataaacatctagtttctcctggagtaatcgtggagtggttgggttcagacaaggaagggagagaggagctataggggcctctctgctttttttttttcttttcccgagatggtgtctcactctgttgcccaggctggagtgcagtagcaccatctcggctcactgcaagctctgtctcccgggttcacaccattctcctgcctcagcctcccgaatagctgggactacaggcgcccgccaccacgcctggctaatttttttgtatttttagcagagacggggtttcaccgtgttagccaagacggtctcgatctcctgacctcatgatccacccgcctcggtctcccaaagtgctgggattacaggcatgagccaccgtgcccggccacctctctgctttttatatagatctctagctcaccctactatttctagttcacttgttcctcactgtcagaggtacctggtgccccctattccagagactttccagagttcttaaaaattcagagttaaaaagttccagagtgtaaatatgctttgcctcttggcttctctctgggcaagcgctgggctttctttgtctttgttttccagattccaaaatttgattgctataatctactttcctgatctctttgaccccatggattttatccatttacaataattttagtattggcacggggctcccccatgtagggtggtgcagggagactcactaaccacaggaggtcctgcccggggctcctcctttacccccttccttttggggcaggctggagggagggtcaggtaatgctgctcacacaaagcctgcctggaagtccagaggtggggggtactctgggcctcagctgtcaagactggcaaccctttaacccctgataacccagaaaatgccctcccttaaaatgtctgagtaccatgcttctttggcatcagggaggggacgggagtgtggtgtcctctaagtctgctccctgcttggccgggctgtttgcagctccttggtcactgagtccttgactgcaggggaagagaggttggcctcaggctccaggttaggccacggttctgagaaccggtgtgggggatcaggcttatattccatgctagagctccggagtcggtgcgtggggttgggatggggctgcagaagtgccttttaagattatgtgcatggactgatctgtcactggttccctgccatctttatcttttggattccccttggagcagggggaggaaggagtttcttttgggttccattgaatcaaatgaaagggaaagtaaagctgttcctatgtcctgggctctggagcttctattcctgatccctgcagaagaaggagacggtggtggtggtgggtgggggtggcggggcacagaggaagccagtaccgggccctgcaccccattcccactcccagatccctctggacacagcatttttctccagtgagcacagccttcccttgccccacagccaacagcaacatgcctcccaacaaaagcatctgcccctcagccaaaacccctgttgcctctctctggggaaattgtaggactgggtcagggtgggggaaccattctctgcagggagattaggagtgtctgtcaggggtgggtggagcggggtggggccctggcttactcacatcctcgagagtcctttgctggcagatttggggagcccacagcacaggtgtctgtctcagtattgtcttccaagctcctaggccacagtagtggggggctcccctctctggcttcttctttggtgacagtcaaggttgggggtggggtgagagagggtcctgcttctcttctaggaacagttgatcccaggaagagcagtggagcctccagcaggggctgttggggcctgtctgaggagataggacgcgtcaggcagccccagacacgaccacattcctcccaacatgcctgctggggtctgtggagcccaggggctgacgggagggtggggtgggggccggaagggtttgctttgggaggttgtctgggagattgctgaagttttgatatacacacctccaaagcaggaccaagtggactcctagaaatgtcccctgacccttggggcttcaggagtcagggaccctcgtgtccacttcagccttgcccttggcacagcctggcaccactccagcttctactcctccccagaacatctcctgggccagttccacaaggggctcaaacgagggcacctgagccagacttctgcctacactagggatgttctgggggtctgagaggatatctggggctggaagaaaaaaaggcccccctaggcctgttcctggatgcagctccatccactttggggctaagcctgggctacaacaatgccaaccaggcttcttgccatactcggtttacaaaagcctttcacatacgctgtcgcattggcttctcacagctgactgcagtaggcagagtagatggtatgactcccactttgcagatgagaacactgaggctcagagaagcgccaagccctgggtcacggggccgtaaatggcagagccaggacccacctgactccaggctgtttcctggcctccatgaggccacccgccctatggtgtggtggatgtcagatcctcaccgtagggaggaaattagggtctgtgcccggggctggggagagctgcctggatttctctttgatgggggtgttggggtgggaatcaccatacacctgactggctgagtgtatttcagggatgggacaggcttctcagcacagcatggcaggtcaggcctgggagggcccctcagacctccttgtctctaacagcgggtcatggtgagggacgcctctctgtgcccaaggtgaccttgccatgccggtgctctccagctgggtatctgtcccctgcagtggtgggcttcctctaagtggatggtaaaggcccatccagttcatggagagctagcaggtcaccaggtttaaggtgcagaggccctgctctctgtcaccctggctgagcccagtgtgcgggttcctgagggctgggactcccggggccccatgggaaagtgtagcctgcaggcccatacctccccctgtgaatcatgcctggcgggacaagaaagcccaaaacaccccaaacaatgagtttccagtaaaatatgacagacatgatgaggcggaggagaggagggacctggctgggagttgtcactagcctgtgggtgatgaaagccaaggggaatggaaagtgccaggcccgccccctacccatgagtataaagcactcgcatccctttccaatttacctgagcaccttctcttcactcagccaactgctcgctcactcacctccctcctcagcaccatgagcacctgcagccgccagttcacctcctccagctccatgaagggctcctgcggcatcgggggcggcatcgggggcggctccagccgcatctcctccgtcctggccggagggtcctgccgcgccaccagcacctacaggggtggcctgtctgtctcctcctcctgcttctcctctgggggagcctacaggctggggggcggctatggcggtagcttcagcagcagcagcagctttgctagtggctttgggggaggatatggtgatggccttggtgctggcttcggtggtggcttgggtggtggctttgctggtggtgatgggcttctggtgggcagtgagaaggtgaccatgcagaacctcaacgacagcctggtctcctacctggacaaggcgcgtgccctggaggaggccaacgctgacctggaggtgaagatccatgactggtaccagtggcagcggcctgctgagatcaaagactacagtccctacttcaagaccatcgaggatctgaggaacaaggtgggtgaatgggcagcagaaggtgccattccagctagctccttctgggaacaatagatgccccaggacactgacaccttaagatttctctataggacagagcccaccccagatcccttctttcgaggtcttggatgccctaagagctgatcagtgagaggatgctctctcttccccagcctgctcatccccttctgatgtcaaatcctcagatcaagtgagatcagtgagtcctgtccttacattttacagaggaagcagttgaagctttgagaggtgctgtgaccagctgcaggtcacatagcaaattaatggcagagccaaggctggggcccttgtgtcctaccttccagcacaggggaggagcgaggctctaacgggagcaggcaagacatccaaaccgctcattagctcactagtctgggctgtggctgccgccgcccataagccttagtacagtctggtccctccccacagccaggcagtcatggagagcctgcagagacaatcagtgtggccccttgacgtgccctgcacaaagggagcctggcaggcttgtgccctggctccagccccctcctccctgctcccaccgaaaatcctttgcttgacttaactcactgccctttagccacacaggactcctgccctggcagtcactttgcttgtttccacctcaggacatttgcacatgctgtatgcccctcccctttttccttctcctggctcacttctcctcccccttcactcaagtgtctctttctcagggagaaggtcactgatgcccccaaccatgccacaccctttattatgtgctctccattcccccaccaaccatgctcacctcagttgtgaattgcgtgtttatttctgcaggtctattttattccgtaactgttcatcaagataagggcttgctcattactttatcgccagcactcaacccaatgcctggcacatagtaggtgctcaataaaggatgaatctgaatttacagtgaggaaacaggttcagagaggggaagcaactttccccaaataagtggaagaatccggctttacactatgacctgcctggctccgaagccggtgctctcagcctccctgctaggtgtgtcccagcagacacaagcctggggtgcctagactcaggtggaggcacctatgcgggcccactccatcccctcactgtggtctgatagggtctggctgggcagagtggtggcaagtgcctgttgtatgagaaagaatcagtgttgacagacaggtgcaggtacccacagccctgcaccagtgggcagtgcacacctgcctagatggcgcatggaggctccaggggaggagccgtgactcagcgggtgctccctctcccagcagccagccacatgctgactcaggtccctcacttgccccacctggggatcaatgacagacagcaatggggagtaagttgaaggtgtgggaagcaagagggctcccatgaccagagcaaagctgtccttgtgcagcctccaggtccccatgtcccccgtggacgatacctttgcctctggggacaccttgcaagtagggtctttggttccctctctgttcctctgtctgcctatctgggtccttgcagcccttctctcctactccatccactctccaaatggagggcctgcatttggggaatataagtactgaaggcaaactgcctgggtttgaattttgttctgtcccttgcaccctgcctggcttcaaatcctagctctgcttattaagttcttttaaggtgatgatctttgagcaaatgtcttagcttctgttttcccaagtaaatggacacaatagttgctaccttgtgaaagattcatgtaattgaccagtgtttaccaagtagcatcagtgttcagtttcagtcattggtgattctgcagttggactgtgatggggtgttggggtgggggtggtgtgtgtgtgtagcacttaattgcacgcagaaaggaaaagatacttttgatgacccagaggcagcttttctctgcttttgtgtcaaaagggaggaatggagtttggagagggaaactaattctgttcaatactaagctctcttcctcaaaatcagaggtacatagaatgtgtaataacttacagaatttctagacttcaacaatctgaattttttaaaattcatttttattttttcaggttgagactgagctaaagttaatctgtggcgacattctgaatgtactggacaaacaccttattccagcagctaacactggcaagtccaaggttttctattatgaaatgtaggttctatactaaaaattaacaagtgtacttcaataattttaaacacgctcaggaataattggctttgtttctttttttcttagctatttcctattattttccttattaaatataacgaaaaatcccacagaaattaactgaggagcctctaaatatcaagaaaattatcacttgatagactagaattaaacaagcaagtggttccaagaaatggcacaagtgtattaatcataaaataaaatttctacatgaaactttcagccagcactgtgaaatgtgtggccgtttaggggaggggaatgagataggtcccatgaaagcaaaagaatataaataggtaaagcaaaagctaatgcattttttataatagcctgaccatctttttatcccaacattgactatccttctaacattaaacaattatttttaaataaaagttggaaacctacatagaagaaagtcatgattctaaaaaggccaacttttaatcttacattttcctttctagtatagaacctacatttcctaatagaaaaccttggacttgccagtgtcagctactggagtgaggtgtttgtccagtgcatccagcacctcgccacagattaactgtagctcagtctcaacctgaaaaaataaaaatatacttaaaaaaatcagattgttgaagtctagaaattctgtaaattattacacattctatctacctctgattttgaagaagagagcttagtattaaagagaattggtttccctctccaaactcccttcttcccttttgacacaaaagcagagaaaagctgcctctcggttataaaaagtatcttttcctttccgcgtgcaattaagtgctacacacacaccaccccccaccccagcaccacctcacaatccaactgcagaatcaccaatgactgaaactgaacactgatgctgcttggtaaacactggtcaattacatgaatctttcacaaggtagcaactattgtgtccatttacttgggaaagcagaagctaagacatttgctcaaaggtcatcaccataaaagaacttcataagcagagctagtatttgaacccaggcagggtgcaagggacagaacaaaattcaaacccaggcagtttgccttcagtatttacattcctaacaacgtgcaacaggcaatccctttagtggaagagatccaaaactagttaagataccaaaaatctatggaccaaagtaactattgccactcatctctattcatttacaatgctgaaaaggtacaacacctctaaacgcacatacccagcttgcttccttttttttcttttcttttcttttttttttttttttttgagactgagtctcactttgtccctcagtctggagtgcagtggtgcgatctcggctcactgcaacctccgcctcccggattcaagctattctggtgcctcagcctgcagagtagctggtattacgggcacttgccatcacaactggctaatttttgtatttttctttcttttttttttttttgagacagactctcgctggtcgcccaggccggagtgcagtggcacgatctccgcctactgcaagctccgcctcccgggttcacgccattctcctgcctcagcctcccgagtacctgggactacaggcacccgcaaccatccccggctaattttttgtattagtagagacggggtttcaccgtcttagccaggatggtctcgatctcctgacctcgtgatccgcccaccttggcctcccaaagtgctgggtttacaggcgtgagccaccgtgcccagcccctgatttttgtatttttcttagtagagacagtttcaccgtgttggccaggctggtttcaaactcctgaactcaggtgatccggctgcctcagcctcccaaagtgctaggattacaggcatgagccaccacgcctgaccttatcacagttttttgttgttgttgttttttttaagagacggagttggccgggtgcggtggctcacgcctgtaatcccagcactttgggaggcgaggcgggtggatcacgaggtcaggagatcgagaccatcctggctaacacggtgaaaccccgtctctactaaaaatacaaaaaattagctgggtgtggtggcgggcgcctgtagtcccagctactcaggaggctgaggcaggagaatggcgtgaactagagaggcggagcttgcagtgagccgagatcacgccactgcactccagccggggccacagagcaagactccgtctcaaaaaaaaaaaaaaagagagacggagtctcactctgtttccccggctgaagtgcggtggtgcgatcttggctcactgcaacctcccgcctcctgggttcaagcaattcttttgcctcagcctcccgagtagctggactacatgtgcacgccgccacgcgtggctaattttttttatattttagtagagacggggtttcactgtgttgcccaggctggtcttgaactccttagctcaggcaatgcgcccgcctcagtctcccaaagtgctaggattataggcatgagccactgcgcctggcctatcacaacgttttaaaagtgaacatataaatattccttacatgtgtatctacattattaaaaaccataaaccaactgaagtataaatgggggaacagtttaacacacatcagtaagactgaaacttatttatgctaagacagaaaacataaaatgatgagtgctaggagaataactgttaaaaacatgcccattggcctggtgtggtggctcttgccctgtaatcccagcactttgggaggccgaggcaggtagatcacctgagttcaagtgatcaacaccatcctggccaacacggtgaaaccatgtctctactaaaaatagaaaaatagctgggcatggtggtgggtgcctgtagtcccagctactcaggaggctgaggcaggagaatctctcgaacccaggaggtggaggttgcagtaaggtgagatggtgccactgcactccagcatgggcaacagagagacactccatctcaaaaaaaaaaaagaaaagaaaagaaaaaaaaaagaattctattgcccagattaacaaactaattttgtgccagctgccttaatgaagataaaataaatgaaataaactactaaatttagtgcaaaggagcagagcagacaatctattaatctggtaattttgttaagaataacgatagctaatattcatggagagcttgttatgagccacgtcctatcctaaatatcctacttgttttaacttcatcctagcaacaaatatatgagatggattctaaaactctcttcacttagaaacaactggggcctagagagatttctctgtgccatatgatgctgtttggtagcattttgcctccagtagtttctttcagaattggggtcagtcctctcaaacctctttgctgctttatcaactaagtttataccctcttctgaatcctttgttgtcgtttcaacaacgtttacagcatcctcaccagtagaatccatctcaagaaaccactttctttgctcatctgttaaaatcaactcctcacctgttcgcgttttctcatgagcttattgcaattcggtcacatcttcaggctccacttctaattctagttttcttgcgagttctgccacatctgccgttcctttctccactgaaggcttgaacccctcaaagtcatccagggtggttggaatcaatttcttccaaactcctgttgatgttgatattctgacctcctcatgaatgttcttaatggtatctagaatggtaactcctttccacaacgctttccatttactttgcacagatccgtcagaagaatcactatctatgacagctttagccttacaaaatgtatttcttaactaataagacttgaaagtcaaaatcgctccttgaaccacgggcttcacaatgcatgctgtgttggcaggcgtgaaaacaacattcctctccttgtacatctccatcggagctcttgagtaaccaggtgtgttgtcaaaaagaaataatattttgaaagaattcttttttttctgagcagtaggtctccacagtgggcttcaaatattcagcaaatcatgctgtaaacagatgtcttccaggctttgctgttaagtgtacagagcacaggcagagtagattgaacataattcttaagggctgtagcatttctgggatggtaaacaaacaacggcttcactttaaagtcatcaccagctatgttagcccctaagaagacagtcagctgtcctttgaagctttgaagccaggcactgacttctcgtttctaggatgaaagtcttaaatggcatcttccaccggaaggtggaggttgcagtgagctgtgactatgccactgcactccagcctgggtgacagagacagaccctgtcttaaaaaaaaaaaaaaagacatatacacaacattgattaagttcatcctcttatatcactgaggttgtaaacaattacaatagcaacatcaaagatcgctgatcgctatgacagatatgataataatgaaaacatctaaaatactgttactgaaatggaacacagagacacaaagtgagcatatgctgttagaaaaacagcaccgcaagacttgcttgacacagggttgccaccaaccttcagtttgtaaaaaaataatatctgcaaagtgcaataaagcaaacacaataaaatttggtaggcccgtacgtgagatttctttgtattatttctttttgtttttctttgtagagatggggtctcactgtcacccaggctggagtgcagtggcaccatcacagctcactacatctttgaactcctgggcttcaagggatcctcccgcctcagcctcccaggtaactggaatcacaggcataagccaccacacccggcctctctgtattatttcttacaactgcatgcaaatctataattaactcaaaacaaaaagttaaacatttattaagtgttgaccaatgtaccaaatgacaataacaaaaacccaattccaacttagattaaatataaagctacataccttaagtagtatacaactgtgaagcagcattttaaaaatcagataaccatgtagaaatacatttctatctaaataaactcaaggcatcagactagaaagaaatgtaaaattacaaagccaagcatttcacacaaatcgtcagaaagccagccaggtacacttcatcatttccactatctgctttctataagatctgaagatataatagcatttgtcttgtatctgttctcaaccacagaggtcagaaccaaactagctaataaactagtctaactactatactttagttagaaaataaactcattataatttgtactcaaagacaatgttcctgaggaattggagttgagatggactctaaggaacatgtcattacatatatttctttatatgtcattacatataaagaaaattatttgaagtggtttgtggcacacagatagaatccttgttctatgtaatgagtgctggcttaaaaggtatgctttctggaaatgacattttgaccaatttaaatcatattttacatgtaataaaactattttctatttacatgaatcaaatagtctcataaagcaaacacttacgtctccatttatttcccactttttgcacaaaattggattttaatagagtaggttttcttaaaaggataaatgctcactgaaattggtcattttatatatttgagactgacaacatatcctcatattatggtaattttatagcaatattgtcaaagaaaacagtgttttctggattcacttgaaaatgaaaccaacctaaagaaaacaaaaattataatcccaaatatgctaccctatagaggaaagggtgtttcttccccttaagtccccttatacattagtcatctttcttttattaaaagtcttaaaatatcctctaaagcagatttcaaaatacaacattcctgagtcctcaggagtcctgctcacagaagggatctttaacttacaggaagacgatgctgacactagcttaagcacgcattcagcacaccacagttacagtgaatcacacaggaattccacacacattccctacccactgtcagccttagtttacatagtggcgtcaacagcgaaaagccagtggttcctaaacatcttctcaaattgcccagtctccaggtccttgctcatttggctaagactgaataaacaaacaccattcattaaaacgcctcctggccagtgtggacacaacgacagagtgactccataccgacggcatcatctagttaaaattaaatttaaacttattttcctttggggtatgaaatatataatcaaatggagttatccttcgtatgttaagtacttgataacagccctgaggtgttctataaactcatctagagcctgtaattaagaaacaaaattctgtttgtctcaagaccaatgtaaactagctgaaaacaataagctacatttcatcagcagttatcatgctgaggaatcactaaaaccatatctaaataattctctttttaaaaaataactcatttccctttaaaaaataactcatttcccttcacacacacactgcaaatggcacacatttcaagaataaacatgatttcaagcatatatcttaaagcaatttaaaccaacaaaatgtaagaacttggcaaaatcacttagataatatctaattagaatcctcttttaaaacaacaggaaagtaagtaaataataaccaaataaataagaaagcaagtaaatgagaaaacaaataagcacgtatataattaataagtaaaaatttaaaaatcaatccctttgcaagctgcaataattaatgaggttgtcactaaccgatcagaccatttacatcaagcattgtggtgagacagtctttcagttagtataagagtaaacagaaatggcgaaaaactaattcttcacaatactaggatttagttaaattgaattcattttataggtgggtaactattcgtagaccttgaagttctgaaatacagagttaaaataagagaaagctttctggaatcaataatattctagttattgcttagttgactcattgtgacatgcttccaacctgggcatcaaacaaggatacacatcaaatcggactcagtctggttggctccttgcgctctgtagccgtggtggcagcagcagcagacgtcggcggctgggctgccaggagcagttccactgggtttcactgtccgagacttcctttggggcactccagcaaaccaaggtggagtacgaatggaaatctgataagcaagggcttcagcaaatcctgcagctattgaaggagtcccagtccccagacaccaccatccagagaactgtgcaacaattctagaaactggaacaacttaatcaatatccagactttagcaactacttgatttttgttcttacaaaattaaaatctgaagatgaacccacaagatcattgcgtggtctcatcttgaagaataatgtgaaagcacactttcagaacttcccaaatggtgcaacaaacttcattaaaagtgaatgtttaaataatattggtgactcctctcttctgattagagccactgttggtatttcgatcacagctatagcctccaagagagaattgcagaattggcctgacctcttaccaaaactctgtagcctgttggattctgacgattacaccacctgtgagggagcatttggcacccttcagaagatttgtgaagattcttttgagattttagatagtgatgttttagattgtcctctcaacatcaggattcccaaatttttacagttcttcaagcacagtagtccaaaaataaggtctcacgctgttgtatgtgtcaatcagtttatcatcaggactcaagctctgatgttgcacattgattcttttattgagaaatctctttgcattggctggtgagccagaggtatggaaaaatgtgtgccgagcacttgtgatgttgttcgaagtttgagtggatcgcctgctccctcacatgcgtaatatagttgagtatatgctacagaggactcaagatcaagatgaaaatgtggctttagaagcctgtgaattttggctaactttagctgaacagcaagtatgcaaagatgtattcgtaaggcatcttcccaggttgattcctgtgttagtgaatggcatgaagtactcagatatagatattatcctacctaagggtgatgttgaagaagacgaaatgattcctgatagtgaacaggatatatggccacgttttcaccgatcaaggacagtggctcagcagcatgatgaagatggaattgaagaggaagatgatgatgataatgaaattgatgatgatgatacaatttctgactggaatctaaggaaatgatctgttgctgccctagatgttcttgcaaacgtgcatcatgatgaactgctgccatatatattgccccttttgaaagaattactttttcatcatgaatgggttgttaaagaattagccatcttgggtttaggaacagttgctgaaggtttgcatgcagggcatgattccttgcttgcctgagcttattcctcaccttattcagtgcttctctgataaaaaggctcttgtccgttccataacatgctggactcttagccgctatgcacactgggtagtcagccagccaccagacacgtacctgaagtcattaatgacagagttgctaaaaggcatcctggatagcaacaagagagtaccagaagctgcctgcagtgcctttgctaccctagaagaggaggcttgtacagaacttgttgcttaccttgcttatatacttgataccctggtctttgcatttagtaaataccagcataagaacctgctcattctttacaatgccagagggacattagcagattcagtaggacatcatttaaacaaaccagaatatattcaaatgctaatgcctctactgatccagaaacggaacatgttaaaggatgaagataaagatcttttccctttacctgagtgtccattttcagttgccacggtgctgcagtctggcttccttccatactgtgaacctatgtatcagcattgggtaaacctagtacagaagactcttgcacaagccatactaagcaatgctcaaccagatcaatatgaagctccagataaagattttatgatagtggctcttgatttactgagtggcctggctgaaggacttggaggcaatattgaacaactggtagcccgaagtaacatcctaacactaacatatcagtgcatgcaggataaaatgccggaagttcgacagagttcttttgccctgttaagtgacctcacaaaagcttgctttcagcatgttaagccttgtgtagctgatttcatgccaatattgggaaccaacctaactccagaattcatttcagtctgcaacaatgacacatgagcaattggagaaatctccattcaaatgggtatagagatgcagccttatatccctatggtgttgcaccagcttgtagaaatcattaacagacccaacacaccaaagacgttgctaaagaatacagcagtaacaattggttgtcttggttatgtttgtcctcaagaggtggtccccatgctacagcagtttacgagactctggtgcacctctctgagaaacataagagacaatgagaaaaggattcagcattccgtggaatctgcatcatgatcagtgtgaatccccatggcataatccaagattttatatttttttgtgatgctgttgcatcatggattaacccaaaagattatctcagagacatgttctgtaagatccttcatggatttaaaaatcaaattggcaatgaaaatgggaggcatttctctgaccagtttcctcttcccttaaaagagcatcttgtagctttttatggtgtttaatgtaatacacttaagctgcagtcccaaaattaggggtccttcagtcttggagactatgagggagcctctgcacccagggaaaatgctacccttcatggggggaagggtaaaccagtagggaatacagtataatctcaaccctactgggaggggcgggagggaggtgttgccatcactgtattaagttgacgttgggaaacgttttaacatctggaggctttgtgggtggaaatatgtctccagttacaactccacagtggacgtgaagagggggaataaaaaagaagaaaaagaaagaaagtgtggccgggcacagtggctcatacctgtaatcctagcactttgggaggctaaggcaggtggatcagttcaggtcaggagtttgagaccagcctgaccaacatggtgaaaaaaatacatctctattaaaaaaatacatgcacacacacaaaaaatctaggcatggtggagggcacctgtaatcccagctacttgggaggcttaggtgggaggatcacttgaacctgggaggtgaaggttacagtgagttgatatcatgccatggcactccagcctgggcaacagagcaagactcctgtttaaaaaaagaaagaaagaaagaaagaaagggatgggggaatgctttattaatgcagttgtttaaatatattgtgattaatccatacaaccaaactgtaaagatgtatcttaaagaacaaggcacctctctgtgtactgaaatgtactgtatgtacatttgtactgaaatataagcataagcaagtatgtgctgtctatgtatgtggaaagagtctgtaatgcattaagaggagaaagcgtgcattaaaggaggtatttcccattttggaggcagggaggaaaatctggcatgcatgtgtgtgagagagagtgcattagaatatgcgcagaaaacacatctgcgaacgcatagcgcaaatgcttactaatggagagcaggggtgctggcccgcttctactctgtcgtgtgtttccattgtgttagacttactgataatgagttcatgtgacttttgtaatcctagagaggggacagcatgtgtgaaggtctgaagcaatagaatgcattagggaaaatactaaaattggcccaaaaaggaaacaaggatggcaggaagagatgagagtggagaggaaggcggcaggcagatggcccagggtagcctacgctctgccaaggagtgtggggttcatcccagtgcagcaggctttctttgtcctcactggcagctcctctcagcctatgaggctgcctccttgtcttctgcccacatctgactgtgggagtttctaatctaatcgcttaggaggccatcaactttacttagggctgaagaatgtctcattcactcaataaatatttacaagccccagcacagtggctcacgcctgtaatcctagcactttggaggccaaggtgggaagatcacttggatctaggagttggagagcagcctgggcaacatagcaagaccccatctctacgaaaaataagaaattagtcaggcctggtgctgcgcacctgtggtcccagccacttgggaggctgaggtgggaggatcgcttgagcctgggaagtcaaggcttcagtgagccgagatcttgccactgcactccaattttggcaacaagcaagaccttgtcaaaaaaaaagaaggaaggaaagaagaaagaaagaaagaaagagaaggaaggaaggaaggaaggaaggaaagaaagaaagagaaagaaagaaagagaaaggagaggagaggagaggagaaagaaaatattcataaagagaaactggaatcccacaggctcagtcctgatgagggtggtcctgcttcctcatctcttctctgtctacactgtctcctgtgacaccatccatgttcctggctgtgtaaagcatcttcatgtgcccctcccacgtcctctctcctgcttggtctccctctaagcacagacttgggaatataactgcctccttggcactttcatctgataggcatctcacatcaaaaactcaactctggcttatagccacccgccaatctgctcctgttttaatcttcatctcagtaaacagtgctaccatccaccctgctgcccaggccagatacctaggagtcttctttttttaattaatttatttatttgagacaaagtattgctctgtcgtccaggctggagtgcagtagcacgatctcatctcactgcaacctcggcctcctgggttcaagcaattctcatgcctcaccctctggagtaactgggattataggcgtgtgccactatgcctggctaatttttgaatttttagtggagatggggttttgccatgttggccatggctggtctcaaattcctggcctcaagagatctgcccacctcgggctcccaaagtgctgggattacaggtgtgagccaccacacccagcctattttcactctcttaatgatgtctttggaagtgcaaaagttttgaattttgaagaagtctaatttatcaattttattgtgatctatctatctatagagctatacatacagacatttcctgatttacaatggttcaacctacaatttttgactttactgtggtatgaaagccatatacatgcagcagaaatcatgccaagtacccataaaaccattctgtttttcactttcagtaaagtattccataaattatgtaagatagtcaccactttattataaaataagcttcgtgttagatgatgttgctcaactgtaggctaatgtatgtgttctgagcacgtgtaaagtaggctaggctaagctatgatgtttcataggttgtgtattagatgcatttttaacctattttcagcctacgacgggtttgttgggatgtaaccccatcataagtcaaggagcatctgcatataatgttttgtgtgtgcatatatttttaaagtctagctgacagtatttggtaatgaattagatttcgggtagagaagaattaagaatgattccagtggttttggtcaagcaagtgtctaagatgggggaagcctacagaagcaggaagttggggatgggggatcaggagctctgttctggatgcacggagtttgagcttgtctgttagaaatccacgcagagatgctgagaggcaggtggaatctggagttcagagtcatttgatagattaggtggctgagtgaggttgcagaagaccaacaggggtgagaaggtggactgaaaggaggagagaatcgaggcctgcccagggcctctgcacttagaggttagacaatgaggtaaacccagcaggaagatgagaaggagtggccagtgaggtgcagttaatcttcctgaacgtcagtttccttgtaataactaggcagcagtcatgaacagtacttccctcatagcgtgatggtgaggttcctggaatgtgcgctaaaagtgcttagagcagcaccttgcatgtaggagctgctcagcgcatgttagctaaacatgagaatcttctctctaaaccttctaaagaattgtcagatcttgcctgatggccttagctatcaggagagaaaatctacagagaaacttggagcccacctcagccaggtggcctgggcactgtaggatgccacctgctcaaggggaggactgggcactgcactgagtctgctgcccagagcctggcaccattgggctggctgaggcacactgccaagccagcaggtttgtgcaacagacttggctcccaaaagggaggcccagaaggcccagacaccctcaggaatagggcctggctgaagactgtgattaaggaggtgagagtttcaagtctggtaattttgttattaaacagaaatgtgacttcatttacattcctgagcctcgaagcctggacttaaagatgaatccccagtgggtgaggctgggtaccagaagtggctacatatttgcagagcccaccgaaaatggaaatgtggatctcttggtcatgtgtcatgaaggatgtcaaggcagttatagcagagcattaaaccaagtgtggggcccttagcaccggggccctctgtgactgcacaggtcgtaggcccatgcagctggccctgtctggccctgcctggtttccatccacaatgaaggaggacagagtctggaaggttgaagagggaggcactagacattcgtgggtagagagaccactggggctacagtgtggagaatgggtcacggtgagcaggagtggtcagagctgttggagctttatgctgagatgggatgaggtctgcccagatgggtggggaggggacaggagaggagtgggaccctctctctggggaggctgccctgtggcttcctgtttctccctgtttcctgctcattgggccttttctgccttctcctcaggaattctcctgggactgccattctgggatgtgcatattcttttattccactcccttttgtagagatggaagctcccccactggtgtggggctgagagcagattccccccattgacagaaacgaagacaccacaacccctccctcacggcaccattgctatcccttcgggaactgtggcttgagatgtcctgttgagtcacttcacaccagcctctcactggcaacctttgaatgtctatgacattcaaagacagaaaaagtaggccaggtgcggtggctcacgccggtaatcccagccctttgggaggtccaggcgggcagatcacctgagatcaggagttcgagaccagcctggccaacatggtgaaaacccgtctctactaaaaatacaaaaataattagccaggcatggtggtgggtggctgtaatcccagctagttgggaggctgaggcaagagaatcacttgaatccaggaggcgtaggttgcagtgagccgagatcacgccactgcactccagccttggcaacacagtgaaaccccatctcagaaataaattaataaaagggaggttctctaaaaaaattctttataagttgcattattcaattctgtctttgtgaaattaaattaaatttaaaaagttatattgtacttcttctgtctttggtttgtttttttgtttgtttgtttgttttgttttgagacggagtgttcttgttgccaaggctggaatgcaatggcgtcgtctcagctcactgcaacttccacctcctgggttcaagcaattctcctccctcagcctcccaaatagctgggattaccggagtacaccaccaagcccagctaatttgtgtatttttagtagagtccaggtttcaccatgttggccaggctggtttcaaactcctgacctcaagtgatctgcccacctgggcctcccaaagtgctgggattacaggcgtgagccaccgcatcagcttttttttttttttttaagagatgctagaagtgtggaattttatgtgaaatctcccaattttcagaagttggcttacatttttaaaacagtttataggacaaacaaaacaagtttgcagactggaattggctgcaggccaccaagttgcaggttctgacagctccactgtcactgggaggcatctggagctgattccaagctgctacgcccagcatcaggaagtgtcaactgtatgttcaccctccagctttcggctgccacacgctgtgtgctctagttacatgctctgacccgccacagaccacggtggctctccccaaggcccagagtccatgatgggagcttgacatggggtcagtgagcttcagtagaaagggggtctcccccaacagtgcagcgagaagcaacaagagttggggtggggacgtggggaacaacatgctcacatgcagggctctgagctctgtgcgctctgcctaattgttcttctcttggtcattggacagccccagcccctgcagttcctgctctcctcaacagggctgcccagtgagaaccggaccctgtctgctagtctgctagaacactttaccttcacagatgcaggattaaataccctggcatcacacagtgaggatgttattttcaagtgtctttcaacccttctgatgacctcaagaagaaaggctaggccaggtgcggtggctcaagcctgtaatctcagcactttgggacactgaggttggaggatcgcttgagcccaggagtttgagaccagcctgcacaacatagtgtgaccctgtctgtaaaataaattaaataaataaataaataaataatttttttaaaagagaaaggctcaggttgatgccagtacctcctctccaccggtgttgattgcattttttttttttttttgagacagagtcttgcattgttgccctggctggagtgcaatggctcactgcaacctccgcctcctgggttcaagtgattctcctacctcagcctcccaaatagatgggattacaggtgcctgccaccatgcctggctaatttttgtatttttagtagagacggggtttcactatgttggccaggttggtcttgaactcccgacctcatgatccaccctcctcagcctcccaaagtgctgggattacaggtgtgaaccaccatgtctggccacattttttttttttaagagatgcgggtctgtttctgtcacccagactggactgcagtggctattcacagacataatcatagcatgctactgtgtggaactcctaagctcaagcgatcctcctgccccagcctcccaagcagctgggactacaagtgcacaccaccacgcctgggtctgatctcacttttaacacaaaaagggcaggcttcagactcagaactttgggttgaccacattatcccatctggaatataatagcagttgagggggaagcaggctcaattcaatcaggccgagcacctgcattcttttaattatgtacattgcagagacagagcaggtgtgtggattctggagcaaaacaatgggagactgtaagtgagtattttagctttttcttcctgatacctttatatacacttgcagagttaccacagcaacctagcagtgattcccttcctccccccaccttttttatgtggtaaagtgtacagaatataaaagttatcatttaaaccatttggaaatgcacaaattactagcattaagtacattcacgctgttatgcaaccatcaccaccatccatctccagaaccttttcatctccaaatgaaactcccattaaacactaactcccctttccccagtcccctgagtccatgggggacaccaagtcagccctcagccccgctacgggttcctgcacctcctggaacctccgtctccttgttgataagggaagtgggatcttgctacttggcaggcttgtggtgatgaccaaatcaatgaagtgtgtgaagcacttagcacataaagtgaatgttcaaagcctgatggctgccctcatccagccaggatctgcacctcccttccaggatcactaagtccattcccagaagggaagttgtgcattgattgcagtgacccggtgatgccttctttccagcccacgtgagctctggcaacgcatcacgttcaatgctcgcagcatgtggacggcccgtgacaacactctagtttccagtgtgaatgtagatttccacttcccgcccacatcccacctttaaaattgttggttgttatttcagtcagtttctaggctgggaggcagagccgcactgaagaagtagacacacccttctcagtcaccttctcatcaccaagtaggaactgagcatctactgtctttctcccttgagcaaatggctggacaatatgcctcaggaatagggctcatcagagggagggtgcgggaggcctgggttctgaatcttacccatctctccttcgttggggtattgagcaagcctttagtgtggaaggaaacaggtcctgaggtgtgcaggaagtggcctgggattttccatatttctgtaacagcacaactatcactgcagccaggtcatttatgatggccgctgggaggacactgagaagcagctgctacctgtggaaagaactgtaggattttagttgatgagaaccactgagggatatggctgccaaaataataaaataatcttaggtgacatcactggtggtagagtgtgtagaaacaagggaggtgaaagcccacactgcagtgtgttggtcagattccttgggggacagggtctaggtccggcacatgccaggaagcctggccaaagggagagatggtcactgactgcctactacgtggcaggatcatgctaggtgctttacatgtgttctctcatttcacatcagggaagtcatgtgagaaaatatcacccccatgtacagaagggaaaactgggggttactgcagtgaagtagcctgcacagcatcatcccgcctggaagtgaaggagcttggaattggggccaggcctggctgactcccaaagtgtgtgcccttgttggacactggggctcccctagaagctggcgttccactctttcataccatgttgcattcttctctggggatccccagatacaaaagagaatggactcagtgttccttcctgttcagcagagcaacccccacccctcattccctgccacccctctggaatcagccctggatgagagtgagttgataggactaggagctgagctgtgccattctgggcttcccaccccccaggcacagaaaacagtgatcaaaatgaaaccacttggcagaaccctcctcactccctagggacagagtgcagtcactcaggcccatgttccctgcaaagacgttgaggtccgtgaaagtaggtccatcccatgagggggcatctgagaagagaggtggggtggtgccgtggtgagcagcacagactccattgcgggactgcccgggctgagtccccactctggcactttgccgctgtgtgactgtgggcaagttgcttcacctctccgtgcttttgtttctttccaggtagaatggggattattatttgtgcctgcttcataaaactgacataaagttaattgtaagacacctagaatgatgtccagcacataaccaactatattaactttaacaaaaaatcttggccgggcacggtggctcacacctgtaatcccagcattttgggaggccgaggtgggtggatcacctgaggtcagaagttcgagatcaacctggccaatatggtgaaagcttgtctgtactaaaaatacaaaaaagtagccgggtgtggtggtgggtgcctgtaatcccagctactcaggaggctgaggcaggagaatccttgaaccctggagggggatcttgcagtgagctgagatggcgccattgcactccagcctgggcgacagagacagactctgtctcaaaaaaaaaaaaaaaaaatctgtgtgcacttcctccttgaagccatgtagcccagctgtatatccatcttaccctttggaatatgagatgcttaaggctgggactatgtccaattctctctgtaccccagtgcccagaggagtccagcacttacttattgtctgcggcaggcattgaattttccaaatattcctggtcccaggtgctctttcaacctcttgctgcctcctgtctagaggtgaggtcactttcccctccccttgagcctgggtggtgctcatgtgattgcctcaacaaatagaatgtggtggaaatggcactggatggcttctgaggctaggttataaaagggatgtaagttccacctggctctcgctgggaatgctcacccgtggactccagccaccatattgtggggaagcccaagccatgtggaaaagccacttgcaggtgttccagtcaatggcctcagctaagatcttagccaagagccaatattaagtggtagacctgtggtattaagaacattcatgctgttatacaattatcactaccatccatccgcaaaactcttttcatcttgtaaaaccagaactctatgcctattaaattataagtcttcattccccctcctaccagcccctaaccaccattctactttcttttgttgattctggccactctaggtatctcagacaagtaaaatcatacagtgctttttctttttcttttttttttttttttgagacagagtctcattttgttgcccaggctggagtgcagtggtgtgacctcagctcactgcaacctctgcctcccaggttcaagcgattctcctgcttcagcctcccgagtagctgggactacaggcactcatcaccgcgcctggctactttttgtaattttaatagagacgggatttcaccatgttggccaggctggtcttgaactcctgacctcaggtgattttcccaccttggcctcccaaagtgctgggattacaggtgtgagccaccgcacccggcctacagtgcttgttcttttatggctgttttatttcacttaatgttctcaaggaccatccatgttgtggcatatgccagaatttccttcctttttagggctgaattgtatgtctggcccacattttgctgaccactcatccgttgatggacacgtgttgctttcacctcttggcttttgtgaatgatgctgctacaaacgtgggtgttcacatgtctctttgagttcctgcttttggttatttgggggatatacccagaagtggaattgctggatcatatagtaattctatgatgaggtttttgaggaacagccacgctgttttcacagggttccagtttactcacattctggccaacagttgttattttctggattttttttttaatcataggcatcctaatgagtgtgaggtggcagactccctcagtctatagggcagagaagagagagcctctgagaagggtctgtgactttgaacactagagctctgagcacgaacattcccgagggctgcttctagtctcctgaagaccagagctaaccactgggaatggattgtggtgactgaagggtgccgaagtcagaactctcagtggcctggcactgtgcctcgaagtgcctccctactgtgttgattagtctaaaaacatgtcagcctttgggtatgaccttactggggcccctccagacagggcatggagcagagggccctcctttatgggctggactcactagtgaagctgcttaactgtgactcacctccaaggctcaaggtgatgctaaggtgctaaactgctggaactcttagctgtgcctgtgtctccttgggctctgggagattttttcttttagcagtattttatggcgatattgtctaggtagaataaaatgtacagatcctggttttctgtttgagttttgttttgttttgttttgttttgagacagggtcttgctctgtcactcaacctgcaatgcagtggcacgatcatagctcactgtggcctcagcctcccaggctcaagcaatactcctgcctcagcctccctgtagctgggactacaggcatgcaccaccatgcctcactaatttttttgatttttagtacacagaaggtcttgctatgctgcccaggcttgtctcaaactcccggactcaagcaatcctcctgcctcagtctcccaaagtgctgaattacaggtgtcagctgctgcacccagcctcagcctgttgttaatggatgtaaacacctgtgggaccaccacccagaaccagatccagaacatttccagcctctcgaagactccttcgtgcccctcccagtcagtgactcccaagggtaacgccactctagcctgttgttcaacttgactcgaatggaattctcacagcatgtgtctgtttggatctggcttcttccgctcagttgcaaggctcattgacgtttcctgtggcctagctcctttttattgctgagggccactctgtagtgtgaaaaccacaattcatttctcccttcttctgttggtgactatttgcattgttaccagcctggggctatgacgagtaaagcttttaaaaacagacaaatatgttttcctttctcttgggtaatttttcagaagtagaaaagccagcaactttgaagtagatatttgactatattacaactcaccaagcagtttttctttctctttattttttttattttttgagacagagtcttgctctgttacctaggctggagtgcagtggcgtgatgagggttcactgcagcctcggcctcctgggctcaagtgagcctcccacctcagcctcccacatagctgggaccacaggtgtgcaccaccacacctggctaatttgccttttaaattatatgtagagacagggtcttcctatcttgaccaggctggtctcaacttcttggactcaagtgatcctcccacttcagcctcccaaagggctgggattacaggcatgagccaccacgccctgcccatttttctaagttggattattttacactcaagtctgctatgaatgatagttccagttgttccatatcccaatcaattggtgattgctacaaatgacgtgacgtgatgaaaatattcctggtattcgagaggattgcaaagaatttcccttcttttctctcctttctgctccccttgtactgtctactccttaacttggtcaaattctacttgatccagaacataatgggatggtgagtgcagacgacacacacggcctcagtctatgggaacatctcaaaggagttcgtctgcaaattctagtgcatctaggcagaacacaggaaggaagagaggtgcagacttacgtatggccctggggcacctgccatcccctcgagcctgtatggtccttacccgcccatccccagcttgagttctgggccttctcgccagcacatcgttgggacctggtcaacttcaggtaagtttatttcatggctccctctcccctctgcagcctatcctgttattctctgtttcagccaattatttcccctaactaggtgctgaagccaattaaaggcagttcatgccatatgttccttcccactcccatgtcacttgaaatgttctattatgtccaatacttctctccccatcctaaagctcacaaaataaggatggagaagagaagaaagagagattcactgagggggaggatcagaagctcctgggcaccccatactctagaataaaaatcttcattatagtgtttttcatgcaaaatattcccttctacataattatgttttaacatgaagaatagaaatttaaagaggagaaatacttcttgaagattctgagaatcttcatatagctcaggctgccacgaattagctgtgtgacctggggcatgtccctcagactctgagcctcagcttctctatatgtaaaatgagttgaagccacccttccccacaagcaccctgtgcacaggcaatacccagccccattattttctggaaccagtggccaagcatgcttaggacacacagccacatacttctgggcagtgtcatctggcaactcactgtcatgtcagtgtggtcaagcattgtagacctctatgaaccaaatatgcttcaggcttgggttgagcacaggagagggaggagggaaaggtcactggggctgggagtgcctacttccctctatgagtgtcaccccagttcacccaacaccctacctttctctctctggacccacttcctcttgctgccggctcctccccattgaataacagccaagttgctttggtttctattactttgttaagtcattccttctgcaaaggactgcctggcaggtgtcaaaggcagtggtggccacagaggcggtggagagatggccttcagcggttgccaggctccctatctgagcccagtgagttccggggccgtgggcacagggctgcctcagccagggggacacagttctggggctctgaggaagcaactcctgggtggcaggagataggggtgggggcatcccaaagagaacacaagcagggcagaaatgtcagtgggggtcgtcctggcacagctgtgccatgctgagctcactcatgcctggagagatgctcctcccatgagtcatgggtttgacagtgttggctgagctgtcctgtcctgtcctgtgcgctcaggggaagaggtgtagagtgggatggtttgtgtaaagaggaagcaagcatgcttctgggacagtaaggatgctacccggcatggtagttaagggtgcgtactgtggagttggcctccctgggtccagctatttactggctggtggtctctgggcctcagtttccatatctgtgaagtgggaataatacttgagccccccactcccagggttgggatatggattaaggaagtagtgtatctagagtgtttgaacagtgcctgacacactgtaggtgctttgggagtgtttcatgttattgggagtctgggtgcagcagggaaggcctcccgaggaggtgtctgtgctctgaagggtgaggcggagttaaccaggcataggcatgtcagggcatctgtagacggacagtctcagaggtgacggaggcagggactgtccctgcagtgtggggtcagagggctgcaggtgccttgctgaaactctgtgaggtttatgagtccccttcattcacggaaaatccaaggttcagggaggcaaaggccagttgccaaatgcccccagatgggagtggcagccccaggagcccaggagccttcaggggtgactgtgtcctgggctgggtcctgtcacaggatctcaccctgccttggcaaagagcttcccgaggggctggagtgggtgggctgatgggcccttcctgagtggggaggcagaatggggagggtgggcagaggcagggtgctgagggcagggaagctgccaggggccacctcagcagaggccagggttgggcttgggtgccctctggtgatactgagtccagaatgaggctgcctatgttctggtctgcagagctcagctctgctttctagactccagagaggaagaatggagaaaggaggcctgtttcctcctggctgtcaccaatgacccctcagccaccctatggaagcccccaaggtagaacctgcatagagggagtgggggaagctggaatgggctgccggtgttgggcgagccttagggtcagcgtgtgccaccttgagcatgtcaccccatttctggttttctgtcagagaggggatcccagagcttcttccaggttctgacatattattattctggtaactggtttttactttctaatctttggattcagaaggaaaatcctcctatgcacatcagagagtttgagagagttaaagcggggccttggagctcagacaagaaagacgatcagtgcagcccccacaggtgtccagagctcccctctaccctacgggggctcccctgggttgggacacttgagcctcactcggtgacccatctggcagtcggagtcacgctttctccacatgccgacagtgggggaaggtcacgcggttcatgtcctgctgaggagggctgagtgccatgagggcctggcttggaaacctcactcccacttcttgtctggcctcatctagcccagcctctttggagggctggggggaagctggaaccacctgctgtgtggcccaggaagcactgcgagagccaggaataaggacgttccgagcttcctcatgagaggaagcctgtgtggtggttagaagcgtgggtgctggggttcaaatcccagctctgttgccgaccagctgtgtagctttgggcaagtgactgaacttttctgtgcctcagtttcctcatctgtaaaagtggccggggttgctgtgaggataaatgttcccggtcacccccagagccctcatggacacacatggatccaaatgccacagcagccttagctggccaacttaaaacaacacatttgtgcttacagtgttggaggtcagaaggctaaaatcaaagtgtcatgaaaggtggccagcaggaccgtggagcctctgaggcaacagggcactttggctaagggccacgtactggctccagctggcaggcagtctcggccagccaggctgagctccctactcctggggccaggccttggtgtcctctggtgatgctgagtccagaatgaggctgcccacattctggtccgcagggctcagctctgctttgacttccaggtaggaagaagagggaaagtccccggtctctgggcacaaccaggaacagagagtaagttctgactcagcagagggattgatttgttccatgcaaagagctgcactgtcaaggccgacatgggccagaggctcagcacatggcatcgcaccccgtcctctcagaacgctgccagccaggggctcagcacatggcattccacccagtcctctccagaatgctgccagccagggactcagcacacagcattgcttccagtcctctccagaacactgtcgggtggtgttactgccctgccattcagaggagggaagtggggcacaggcaggtcaagtgacttggccagtgtcagaattgctagtgtacagagctgggaggcgagcccaggcccatgggaccacaaatccaacacaaaaatccatcctcctgcaccctacggagcaaaagtaggtccagttgttttcctgggtttcctggacacacggatctaaattccacagcagccttggctggccaatcttaaaacaacaaatttgctttcttaatgattctggagggcagatgttaaaatcatcgtgtgagcaaggttgtctccttccggaggctccaggggagaatctgtttcttttgcttttccagcttctagaggctgcctgcctgccttggcttatgacccctcctgccatctttaaaaccagcagctttgtctgggtgcagtggctcatgcctgtaatcccagcactttgggaagctgaggcaggaggatctctttagcccaggagttggagaccagcctgggcaacaaactgagactgtgtctctacaaagaatagacaaaaattagccaggcatggtggtgcatgcctgtagtcccagctacctgggaggctgaggtgggaggatcgcgtgagcctggggaagtggaggctgcagtgagttgagatcatgccactgcactccagcctgggtgacagaatgagatcctgtctcaaaaaaaaaaaaaaaaaacacaacaaacaaacaaacaaaacccccaaaaccagcttcttgcttctgttgtcacatctcttacctctgactttgatcctcctgctcccttttatgggacctttgtgattacattgggaccacctgtataatccaagacaatctccccatgccaaaattatgcatttaatcacatctgcaaagtcccttctacaacatattcacagtttccggggattcgaatgtggatgtttctggggggtcgcccactgataaccagtattataagtttcttgtaaatccttccagagatattttatctataaataaataaatgcaagtccatagccttcccctacccactttttatgcaaatggcattattccatatcggtgctcagagttttcctctttttcttttttcttttccgtcttctttttcttttcttttgaaagctacacagaacttattctattatatggaaataccctaatttatttcaccttttccctgttggaagacttttaggctccttccaatgctttgctttataatcctttgtgttataatgctgcaatgaataaccttgtttgttggatgatattcaatttaaaatctcatttttcaggacaggcatagtggttcatgtctgaaatcccggccctttgggaggccaagacagaaggatcacttgagcccaggtgttcaagaccagccctggcaacatatcgagacctggtcttttcaaaaaaatttgaaaattagtggggcatggcttggtggcctgcacttatttggtctcagctgctcgggaggctgaggtgggaggattacttgagcacaggaggtggaggctgcagtgatccatgatcacactcctcactacactccagcctgggcaacagagtgagaacccatctcaaaataaaataaaataaaataaataataaaataatcttgtttttcagaaattgggggtgccatttaagacattttgaaacctcacagaacttttttggggaacttgttgccttggagattagcctgccctgtcctgcccccatgacctgtacttggtctttctccctcctggcttccttagttaagccttgtgtggacttgcgagcccatgtccatcactctctgccttcaattctaggtgctgtggtgtgaatacgcttgagtggaggccgcatgcttcccaggagggtgtgtattttcagcgttgtctctcatgatagaatgaaaggctctggagggaatcacaggctgccacaaacaggcaaggggaaaaatcttccacagacgcgtttcagggacaacaggcttcccaatcctagcccatgctggcccataactggatcaggctgactctccttcccccacaccgctggtgtagacagggacaagaaagagaagtcagagacacagagaagctgtgatttgcttgaggtcaccaaagtatttaatggcagagttcagacctgacctgaggggcaagaaaagacaaccccctcaaatccatggggagcagagactatctggatcagatctcagattgcctggggctttcacggtgccaggtgtgtacactgagctaggatgggtttcccagggtgctgtgtggtcacataactcaacaatacagaccagaaagcagtgaccagtaggctgaatttggctagtgggtgttttctgtttggcctgcacagtgtttattttaacttgttattataggaaattcaaacatgcagagagaattgtaccatcaacaacacacacccatcactctgctccaacaatgatcaactcaggcctatcttgcttcatcctataccctccctcgcttgcttctcttcccaccttcagatatgcggaagcaaatccagagatttcattccattgtaaatatttcattgtgtatctctacaatgtgggaatttggggagtttcatttgagacagggtctcgctttgttgcccaggctggagtgcagtggtgcaatcgtggctcactacagcctcgacctcccaggctcaagtgatcctcccacctcagcctcccaagtaactggggttaaaggtgtgcaccaccacatctggccaatttttttattttttgtagagatgggggtcccactatgttgcccaggctggcctaaaactcctgggctcaagtgattgttttacctcagcctcccaaaatgctgggattatagatgtgagccactgtgcccagtcaggaacttttacataatcctttttgacaaaagatttcccccaagaaattagaaagttttacaaaaaaaaaaaaaaaaaattcaggtttctgtctcatcttaaaaatttggaagttctgccaatactaagcccagacggtaatcattggttagtgctgagaagatgttgactttttagatgaggcgtgtgacgtctactttgccacagtccccaccactccctacctggccatctgactcatacacatcacctgcctggcttctttaggcatttaatttgtgtaggaaattgacctaaaggagatattagagaagacattaaaaacttgaagaatgtgaaaatcagccatgagatagaactgtgctttaatgcaggttatagaaccacaccggatatgaggcatttcggaataaactttgaaaattggaagtaccagtttgtgaattttgctcagagagaccaaggtggggggtgggtgacagtggtgaagcgtctcctctgtgccagtctcttctaccacaggctttttctcacaaaatcatcaatcatatgcagtaggagaaacaccttcctattttacagatgaggaaactgaggcaaagagaggtgaaataggcttcccaaggccactcaggtcaggagcagcagagttaggattcagacctggagtcggcctgactccaaaacgatgcatgcctcaccatggcccatagctcctttaaagaggcgcggaagagagaatttgacaaagtgcttgcccacggggcctgggatgggtggggaaactacgctggggctcggggctgcggagggcatctgggaagaggctctgctgaaggtggtcaggagggcaaaggtcacggtggccattgttatatggtggtggtggggagaggtgcatgccttcttcttgacactctctggtgaccctctcggtggaacctgcagacccttgatgggcccctttgttcccttgggcctcctgagtccccagccagggcgctgggcactttgctgggagcttggcatggggtccagcagccccattgctacctagttccttaccagcccagggcgtctgcctgctacttccctgcctggaaggaaggccttccgcctggagcgttcctggtgtggcctccgctgcctctcagactctcacacaagctcagctccctgtcgcgtcctctcagggccaggattctccttatcacaagcttagactgtctgagtaactaattggatttgtgtctgcctccacacaggaccctaagacccgtggggctgagactccttctgtcctggtcacagctgcaccctagcccctcgcatggtgcggtcacacccaggccagccactgactagccccgaaggggagcaaacaggaggccggccacctgactgaggccccatgtcttctccctgcaggccgtccccttttctgggactatccaagggggtctccaggacggatttcagatcactgtcaatggggccgttctcagctgcagtggaaccaggtgtgtgtatatggatggaaacgtttcactccagcctcgtcccttagtaaagccactgtgcctgtgagcctcggctagttcaaacaacaacatccaagctcacgtgcctggcgcaggggagacccaatgcatccttaacccatgccacaggacagcactccacaggcacaacctgcacccagggatgccattaacctggactccaggatgaatggggccctgggagctgaaggtctaaggaaggagtgggatggtcagagttggatgattatgttctgggctgaaccttgcacactgtgactgagagttgcaaaaatcaaacttcctccgtttcccataactgctctcatccactctgaagctctccttctgctgacatgaaaatactgaaaattgacatccgaagtaatttggtctctttcggtttcaaggccttttctggaaactactaagtccattcaaaatactaacattgtatcagggctgtttcccaccccttcctccctcccaaggtgggctgtctgggaacagagaggagctcacgtggcttgtcagtggctgggagggcccccgaccctcacgcaggcctggctgacccctgccgaggcatcctgactgggtggcacagaggtgtgcagctctctcctggtttagtgagggaccacgggtggctgcctgctgaagtctgcggggcccacagaagagcctctggactcatggctctctctcggaagcctctctgcctcagtcccagcggacctctcttaagaccctctgggcctcgtagatgccagctcaacctcagctccgccacctagattcttgatgacctcctccgccattgccatcctgctgtcggacttctctgagagcctgcagtgcccccaggagatgccaagggcagggaggccctgatccccctgaatcctccaaccgggggaatcagaaccatgcctctgatcttccaccccttcctctttccctctccctctgtttcccccacctcccagcaccaggagggcttcccactcccatcctgttgcacggagacagatcctacctcagagggccctctcctctcaggagctttctgtctctcccttccttggggcaggaatttccaaagggccacaggaatgaagctgaaggtctccaaaggaaaaaaatacatgcagtgatatttcaaatgcaatcttctccatttattcatttaattaatttatttttttctttagagacagggacttttttctttcacccaggctggagtgcagtggtacgatcatagctcactgcagcctcgacttcctgggctcaagggatcctcccatctcatcccccagagcagctgggactgtagacatgcatcatgatgtctagctaattaaatatatatatatatctttttgttttttaagtagagatgagatctcgctctgttgctcaggctggtcttcaactcctgggctcaagtgatccacccaccttggcgtcccaaagtgctgtgattacaggcgtgaggcactgcgcccggccccgatttcacatgctctttacatttgttctcttctttcgcacttaatcaggcatgtgctggcctccaacaagtgtccactggcacagaagcctctctcttctaggtgtgcttaacaacttccatctttgttaccaactggtaatcactttccaggacctatgcttcttgtttgctaatgccagcactttcccttagccattttctacttatgtttagaaaatcgtgctgtaaaggcaaaatgcaataatcgcacaaaaacacattggatccaaattagagaaacaaaaaggatgccaaccaagcagtctctgccacgcaggttgtatgcaagatcccagacaaacacagggcagaggcaccgaggccctcctgtgcctgtcactggcaataatccatgccacagaagactatttgcttttcctgggcctaggtttgctgtggactttcagacgggcttcagtggaaacgacattgccttccacttcaaccctcggtttgaagacggagggtatgtggtgtgcaacacgaggcagaaaggaacatgggggcccgaggagaggaagatgcacatgcccttccagaaggggatgccctttgacctctgcttcctggtgcagagctcagatttcaaggtaagcaggaatcccctccccacctctcgcccacgggactcccagccctatcaggtgaatgtgaatggccttttaagtaaccactttaattgacattcagccagagtgacaccaccatacagataacatgaccatttccttgtaagggtgttacccatggctgtgtagtctccttacgcaccttcacctgaatctacaggtgcacctcctgcttcttttactctgaaaataagaactagaggagtcatcacgttgctgttaggtgttgtgtgtctttgaattccaagctcattccattcctctgctatcaccatacctcctctccaggtccctggtaacatttatttttcagcgacattgttccagcccttatccagagtctattacggttatagttctgtaagcacattgcaaattacctttgcaagcacagtaggtctctgggcttgagaagccggtgggtaactcagtctgaatatgcttatctgagataaggatgttcccatccattcagtatgcaacccgatgtcacctctcctctgctccccgtgagcattttatgcatatttaaataatacccctgcagtcctaaaaaggaatgagatcatgtcctttacaggaacatggatggagctggaagccgttgcaggagcagaaaaccaaacaccgcaagttctcacttataagtaggagctgaacgatgagaacacatggacacaagcggggaaacaacacacactggggcctggtcggggacggagagcatcaggaagattagctaatggatgctgggcttgataccaaggtgaagggttgatctgtgcagcaaaacactgtggcacacatttacctagttaacaaacctgcagatcctatactcataccctggaacttaaaataaaagttgaaggggctgggcacggcggctcacccttataatccaagcactttgggagggtgaggaggacagatggcttgaggtcaggagttcaagacctgcctggccaacatggtgaaatcccgtctctactaaaaatacaaacattagcttggtgtggtggtggatgcctgtaatcccagctactcgggaggctgaggcaggagaatcgcttgaaccactgcactgcagcctggctgacagagtgacactctatctcaaaaaaaaaaaaaaaaagttgaaggaaaaataataaataaatgaaaccccaggaaattcagtttggttcctgagcatgggctctttctggaacaatatggcctcctaaccaggctggaaatcgaggagtgagaagaaaggggaaggaaacaaccagaagaatggaaagcccgactggagcccagtagagactccggttgatgcacttcgggccacacacacgtccctgtaactggccccacactgaagaccagactcaggtcttcattttttagaaggagggaccaggagctcaggggtggtccccatcccggcctggggcacctcccccgaaatacgtgctctcctctggcaggtgatggtgaacgggagcctcttcgtgcagtacttccaccgcgtgcccttccaccgtgtggacaccatctccgtcaatggctctgtgcagctgtcctacatcagcttccaggtcagactgtccacctggcaccggtcccaggggctgggatgcagggcccagcgtagctgtgcttaggcccagctggggggacccaagccaatctcctacccaggtcactctggggacaacctctgcttccctgtcccagtacctgcccgccccttctcctctgtcactctgcccctccttctgtgtcactgtctctgtctggaacacctgccttggtctcccagactcctcagctgcccctttctcttcatccgtcaatttccatcctggtaaggagggcatattgttctagaaagagcccaggctcaagaaccaaactgaatccagttcaaattcccagctctgccattcgtcatctgtgggatcttagacaagcaactttgcctctctcagcctcagttttgtcatctgtagaatgagcatggtcattgcctgccccccatgggtggttgtgtgattcattgaggagacagatatcagaggtcacacaatggcgcccctgggcccacaccagggtctgtgtgacctctgtgttttaaaaactttgaatgcgttgccaacatctaaaaggtcaggagacccaggtatggtggtggaggtctgcaatcctggttactcaagaggctgaggcaggagaatcgcttgagcccaggaattagagttctgcctgagcaacatagcaagaccccatctctaaaatctttttgtttgaataataaaataaaataaataaaactaaagaaggtcaggagataccaacaccacgtgaaaaatgggaagattagggtatgctgggcccacattcccacagggcaccggcagctggatgggagctgctgttacccttttggcattcaagggagctccctgagatgagcgaagtgcacagtaggccctcagcaaatctgggctcctcaccctttggtcctcatctctcattccctccttccctgactctctcccctgcgggtggaaggggagggaagagctggagggagactgtccccctgcgctgctcaccgaagcctggccctttccgctcccgcctccgtgtggccctaacccccttgctgcatccccctgcctgcctgttctctgcctcctgcccctgcatctgcctttcggcttctccttggctctattaatgcttctcctcaccggccggtgccttttgttttaacagaatccccgcgcagtccccgttcagcctgccttctccacggtgccgttctcccagcctgtctgtttcccacccaggcccagggggcgcagacaaaaagtgagttcaacacagaggccctgggtggctgagcagacagcaggaaggaccgagggtttgagaggctggccccagccagcaggccaccagggcctatgggccacatcttgcccactcaagagttccctgtctctgtctgctgggcacccagagccggggacctgggtgttgccctggattcttcactaccctttctttatgtctctccaaggcaccaacatatctccctcccaaagccaccgatgtggcccaggcctctgggattcctcaccatgactacaggggtccagttccccaccccccacacccaaccgctgccacagtgaccttcttataagcaaatctgatcacactctctccctgcttaaaaatcttaaaagtccccagccctttaaacaaagcccaaattccccagcagggcatacgaattcctccccagtctggccccagtccacctccttgcctcacccccaacccacgaagctcatgcaacctccacggctcactcaaggccctctcgggccaccatgcttttgcatatgctgtccctggtcccggaagcaccctctgccagcctgccctcagcacacgcctaatcgcccttccatgctctgccaaagtgtcgctcctctgggagtcctccctgcccagaatattgttggatgctccccccatgcccccacggagtctgtacatatctgtgccatgccagttcacagcaccccattgtaactgtttgcgtgtctgtccctgtcactccacccccatctccctatgcccatgaggccccagagggctgggactgtgggtcgttcatttgcacagtgcctggcactcacttagggactcgaagaatggatgaatgtggaatgtggttttcgcagccagggagaatgggataccagccagggcaagaacagtctactgggtggggcaggatccacgacaaggaggtgggcagcccttcctctggccactcaagcagtggggactgggaggaggggcgctttgtctatgtagcctttttatggcccatgatggtacagacagtgcacctgcctcctgccacgctgacttcaggactggtggagccccagggaacattcgcagggcagccaaactttggccctggccctggcgctggccctggccctagggatgacagaaagtgtgctggatacagtcagacagaattggctgccattttggatttgatcccttccacccgggcaagcttgggcaagttgcttaatctttctgagcctcattgcctcaccagggacacaggagctgaggctgcttccctctttggaaagcactgaagcccaggactcggcccacaataggccttcaacaaataccacttctcagcttacgggtgaaatatggcaccggaagtaatgctcttggctgtgggagctacagacagcaatgaggtctctatcaaacccagcctcctctctctcgagaggaaccagtggggataccctacccctcaaccccaaagccttgtgcacctgagggtaaaaatctgggtgccacgggctcaggaaggcttgcttgggagcaagagggaggtgggtgtgtctggggaggcatttctgagcacaagagcctccctggagttctgccatcgtctctccccgttctgtggtgcccgcaataaccaccgttctgactctcctcacccctccagcctcccagcgtgcggcctgccaacccagctcccattgtaagtctcttgctttctttttggatcctcttgattttggctcttcttctgggctaatggaggatgcagggccaggcattgggcctctcccatcgggagtggggagggcagaggccaggcccttgaccatctacccggcctggcgaggttggtgggtgaatgtggttggctggccgtgatggaacaacctgagttgccactccatgggcagccacggaagaccatgccccacgttcacttctctcacctgcaaagggaggctaggctgagagacgtttccccgagaggaaagatgggccagagccaccagcgtccccatctgtcttctccagggtcctaacctttgcctctccctcgtcccctggacccaccctccgtggggtctgtggggccactgggctggttatgcccctggagggtgcctgccgtgtggcaccctctggtgggagctggggtggtctttactcaggagagcctgggtgagacctggtttctttcttccagacccagacagtcatccacacggtgcagagtgcctctggacagatgttctctgtaagtcttcaagttctgatcagttcacagctgcacagtgccctccttccccaagaactaaactccctagagccctagagttgggaagaaagcggtttagcaaggagggtggggacatctggggctgagtccttggctcaggtgacatgtggttaaaactatccttgggacagcagagattctggatttatccagtggtggaagaggcaggttccctagagactgggagggaaactggtccttctgtcaccaagtggggagtgcagtggccccagcacccggatgtgaggttcctggccctgcctcctgggtccccgggatgtcactacagatcacaggcttaagctcttctcctgctggtgcaaatcaggccgggaacttagcattagtggggctgcctgcggaggggctgaggggcaggtgaccatggtggggtctgggaacacggcaggaagttccaggaaggctaacatgaaaacggaggtttacgggagagtccaagggccaaaggctcatgaggtcagcctcacagtggagccccctctagaatgcgtgggtgcgcgtgggtgagtgctcgcgcacacatgcgctctcccattgaatttcctggtttcttttcagcagactcccgccatcccacctatgatgtacccccaccctgcctatgtaagtggtttctcagggagggcagaggttctgtttgtggtgggcaggctagggatgaagggccgctacggggggatccgctggccttgaaaaatgaaaagcgaagggctttcaaaatggtaagctgaagggcttcaaagcgtcccagtgaattagaagactgtggagaggagctttcaaccttaaaactgtcgtgtcaacgtgagcacattgcatggccctcccttttcaccccacgagtctttctttctgtgtttggccaaatttcctttcatgacactaatctaagcccattaatttgaggagcaccggaaagttttcctttggcttttatggaaccaaggaaagatatcgtgggcttcttctcagctgacagcctaaattcatgggaactggtacaatcttccccttccatgtggcggctgccctgactgccactggctgacctgtccccgtccttctgacagccgatgcctttcatcaccaccattccgggagggctgtacccatccaagtccatcatcctgtcaggcactgtcctgcccagtgctcagaggtaagccaaaggctccagtgacctctgggaagagagagcccttcaaggtcattccagccattcccctggcttttggcaggctggggatgatggggaggaaatggggctcagaactcagtggacaaaggtccaggtaggctgcccaccccaggttccacatcaacctgtgctctgggagccacatcgccttccacatgaacccccgttttgatgagaatgctgtggtccgtaacacccagatcaacaactcttgggggtctgaggagcgaagtctgccccgaaaaatgcccttcgtccgaggccagagcttctcggtaaggcgccgcagcctggagcttgaggaggctcctatgggtacacggggagggggtaaaggaggtctggggtaccttgaacaggatgggagctgatgcctctgggatgagggcccagaagaaaaggtggccaaaaaattattgtcattattattaataattattactgtcctgcatgaaggaagcgttgggatctgcttttttagatgaggaaagaaactcacaagtgcaggttacttgcttgcggtcacacagtcagtaagtgtcaaatcagacccaagaaggaggtgttattcatttcttcactgactcattcaacgatttcactgtcgcccgctttgtgcaggaagcactccacatgctgggagcgcagtcatgaagcagacacgtagggtccttcctccagagagtttacaatttagctgggggaaggaacaaggaaactaaagcatgaacagattgttgcagataacaacagtgccacgcagaaagcaaaacagagcgatgagatagagcgagcctgggaggggcagctagggccaacatgcagaggtgtgggtgtggcctctccaggaacagcagcaggcgtgctccgccctgactacacattcaaatcacccagagagcttacaaagaacatataggtgctgggaccccagcccaggccaatgaggcggtcagcctgggcatttgtatttttaaaatatgcctgaagtgattacactctgcaatcagagttgaaaatgactgatgtagggctttgcagccatggagccagggagcaacattctttgatttgtggacagctgtgtgacctcgggcaagtgacttagctactctgtgcttcagtttcctcatctacaaaatggagctaataatcatatgaatctcctagagctgtaagaatggaatgaggcagtatctgtagcacgcttaggacagtgccttacacatggcatgtgtgttaggagtgtcagctattgcaaagggcaggaggttttaacatttgtaccctgactgcctcatggagaaggcattggggtggaaaagacaagttaggaggctgatgctgcaggagcccaggcccagagcactcctgtgtgctgggtccgagggatacagatggcacaggccagtgctcctgtccctgatgtcgtgggaacagtattctacgccagggaacagtacaggggaaggagcacgcacagcctgtttagtgaagagccggtcgctcagtggggatagagtgcaggtgaggggcttattaacaactgaggagggagggagggagggagagaggaggctgcagtgagggtggaggacttcccaagtgtagtgcaaacggcataatctctgcacaggtgtggatcttgtgtgaagctcactgcctcaaggtggccgtggatggtcagcacgtgtttgaatactaccatcgcctgaggaacctgcccaccatcaacaaactggaagtgggtggcgacatccagctgacccacgtgcagacataggcggctccctggccctggggccgggggctggggtgtggggcagtctgggtcctctcatcatccccacttcccaggcccagcctttccaaccgtgcctgggatctgggctttaatgcagaggccatgtccttatctggtcctgcttctggctacagccaccctggaatcgagaaggcagctgactgggattgccttcctcagccgcagcagcacctggggcgccagctgctggaatcctacaatcccagaaggcgggcacagccagggagaggggaggagtgggcagtgaagatgaagccccatgctcagtcccctcccatcccccacgcagctccaccccagtctcaagccaccagctgtctgctcctggtgggagatggcctcctcagcccctcctctctgacctttaacctcactctcaccttgcaccctgcaccaacccttcacccctcctggaaagcaggcctgatggcttcccactggcctccaccaactgaccagagtgttctcttcaggggactggctcctttcccagtgtccttaaaataaagaaatgaaaatgcttgttggcacattcatgtgggttgactgtggcttctttaattcatttggagacattttggaatctgtggaatcaggcggaggggctgctgagaggagtgggatgggagagcatggactccctttgggcagggggtcctgacctcacaactcctaattaaaaaaggattaatggccgggtatgctggctcacgcctgtaatcccagcactttgggaggctgaggcaggtggatcacctgaggttgggagctcgtgactcgcctgtccaacatgaagaaaccccatctctactaaaaatacaaaattagccaggcgtggtggtgcacacctgtaattccgtctacctgggaggctgaggcaggagaatggcttgaacctgggaggtggaggttgcagtgagccgcaattgcgccattgaactccagcctgggcaacaagagtgaaactctatctcaaaaacaaacaaacaaacaaaaaaacgaaaaacgagctgggcatggtggtggtggcggtgggtatctgtagtcccagttacttgggaggctgagacacaagaatcactttaacccgggaggcagaggttgcagtgagccgagactgcaccactgcactccagcctgggtgacagagcaaggctctgtcaaaaaaaaaaaaacaaaaaaggaagccaatgcatgggctcctctggtggccacagggtctagaattatcaggtctcagggatgacttcaccagggcagtgtggaagggaaatgtggggttgaagcccccacacagagccccctctgggccagtgtctaggggagctatgagaagagagccaccgtcccatgagggtgttggagaaagcaggctggggctctagtcttttgggcaggagtctcggacacaggaaaggtggtaatgggggaccccaggaaacagccccatgcctctgagatgggaggcgggctggggcagagcctgtgagggccacagcagggccagagctggctcctcggacctggcatcccagtgggaggaggtggcttggggaaggggtgtcaggagaggccgacccgaagcaccgtatgggtgtgtgttccattgtgggtctccctggcaatagggttaggactcgcatgagaaaagtggctcagtgtccatgtgtggggttctgccagccactgagccaccgccagacagcccagctccgcgtcaacgtgatgccaatacatcctgcttggcccagcaagaatacagttcctcaggcccccgtgtagtcctcagagtggtggcagcagcagcgactgagagcttgttggaaacgcagcatcccgcaccccaccccacctgcgagatcagagtctctgtcttcacgggaccccagatgaggcccgcacatgaaagcggggaagccctggtccggagcggactcctggccgtgttgctgagatgcacggctgccacgcagggcagggcacgtctggagcctgaagttggcactgcaccttctcctgccacctgagacgctgctgctggaaggaggaggggagggggagggtcctgggcctggcccaggaggcacaggccaaaccccagctgggaaccacgtgttgccaggaccccagaggccgccactgagctccttccttggttctgaccaggagaaggaaatggacctagtctcttaaaaagccttccttggccgtctccaaacccaggagggtcttcagtcccttgggcgaggatgctgtggcccacactcgctttgacaccctgcgttcccagaggccacatctgtactggccaaactcacgtgagacaggtggccccagagcaaaacctttctaagacagtgtccaagaagaagctcaagaccttccctgaagctctggcctcatatgagaatcccactcttgccagaccccacgtcagatcctttgtgtgggaggcaggcctgtgccgtccaccctaccgcaggtctttggaccagcacgaagctccatctgctgctgtcacacctggcagccatttcagaggagccgtggcctgcctggggtgtccctctgtggggcatctgtccaggctgcgacacccaccagctccccactctataactgagggccacattccctacaaaacatcccccaccagcccacccaacaaacacacatacagtgtgattaaagtaaaattcaatgcatgtaaatatctccatcagggaatcatacagagaagacccaaggggccattaggaacagactagggtgttcgttttttaaacagaggcataaataattttacccatggcagttaaatacacagtggtgtgacggcacttcctggtggtcacttgaagtggtgcactcagcagcgggttccatctttcacccacttgccaggcctggcattgaagatttcgtctccaagggaccagggtggccccagcttgagagaggaggctccgatcaatccagggtgctacttggtaggaggtcaagtaaagggcttgatggggaacgaggtgagaaataagaagtgaggctgggggatatcactttcctccatctccccaggccctgtgacctcggataatgcagagctggctccatcgttaagttctgtgctggcagctttaacccctcctgtgggccctcagagcgctgacatctccaggctgctgggctgcaccgccgccctgtccttctttgcctcgtagggaaatacagcaccaaagatatcgtcatggaagtgcttctggctcttttaggtaaaaacagagaccaatgtgtcaagtccaggctggaatgagcccctggggttgcccagcttccctatcacatggaccttcatgagccatctgtcttcccaactgttatactttgattgcgcttgaatctggtttagaccctaaacccgctcagcacctgctctggagcaggccctctaaccatttccaaagctttacttggcattcccatttcctgccctgtgctcatcccccacccaagatgctccaggaagtgtgagctttcagattaacacatttgggaaatgctacatcctttctttcctcccagccttgaagggtcccgatgcacagcagcacgttgaaggcccccagaagtcttgtagtaaagcaacgtgcttgccttggcttaactaagcatgtcctaggctattcgaccttgtaaccttttggatgccaaacatctaccgactcatttaacacatttggggaaatgcctgttatctcctcactgttcttcaaacacgccagcttaactcccacccccgggcctttgtatctgctgccctctccagaacagcccagagtgtttccttcagtatccacggggctcctcctcaccatctcaggtttattctcagacgccgccttccagctccgccttccctggccaccctatttaaaattacactccccagtgtcccctgggctatttcctgctgtttttctccgaagcactacacctcttccttgtttgggtttgtcagccccagtggaatgtaaataatttttgcctgattcatttactgctctatccctagcacacagtaggtgctcaataaatattcagttgaatgtatgaatgtgtcttagggagagtatggaagtcacaatcacaggctttggaatcagagagacgcagactgaactctaggctctcactgctgtagaccccataggcccccttccctctgtaaaacagggtgcttccctcataaagtcctcggcaggactgaaagaaatgtcacatgagaatccttggcaagcacttggcccagtgtaagcccttgataaatatcactattatcttcatcaataaaatgcaagcccttcctgctgggaggatgagggtgagcagacgccagcctgtgtgtaaataagaagtgtgaggttcacacgaggctgacggggggcagccttgctctcccctgtgttcacagccttgctttggccacacagatactttctgaaaggggggtttggggagagggcaagtagactctcttgctcccattccacagatggaaaaatggaacacattcacctgacttctcaaagctgccaaccagtccaggatgtgcagtggggccttctgacagcccacccagctcagatcccagccactgctaagattcccttggggtccagaacttttctgggcctgactcccctgggtctacctgccacccctggtcctggctccaatagcctgtgcccttggccaggaccctcagcccatacacccactattacaccttgagctgaaagaaatagtcctcgacctgctcctcattcaagttcagctaggcagccaccagctgctagggtgtgggccacatcccaggccatgcacacagccctgcaaacatagaggtggcccggctccttgtggagcacacggagcacctcgctggccagctgctgctgcaggatgtcctgaacacagacctaaaaccagaggaaacggtgggtccagttcccggccactggagacaaggattgcaggcaggactgctggcctcagggaggtggggagagggcactaagggctgtggagtgagtcccctcccagccacgaccttgcacaggtccaggctcaggatgaggaggagcacagatgctctgggggctgggctgggagtagagagataaatgctggacacaggcctgccctcaaggggcagactgtccagtggggctcccagactgtctctgaatttgccatgcttcaaagaggcatcaatgaaggcagtccccctgcccagggctctgcctacacccctgaaaagtaccctctcaatgcagactgtccatcgggtccctgcagggtacggatcccgggcttcccagttagaaggtccaggagtcagtcggggactctctgctcctgctccacacaggatgcccagtggccccagcactgggcatagagcactgggcccgagaggtgccctgatggcaacaaatgtgtgagagccgagagtctattctgacacctcaggctcagagggcaacgcggccctgggggcaggtgagcccgtctgagggccatggtgggtttgaacgtagccggcctggaccacctctcccaggggagtcgcctgtcccgggggcctgctgacgaccttcagcaggctgggctctgggctcaacccgcctgtgacctaggttagtcctgaacctctccggtcctgtcacttctcttggaagagagggcgtaacagtcttcacagccccactctgatggttgtgaattacctgcattttagagctcaggagctgcaggctcagggaggcgaggggcctgtggggaccccgggctcacactggagcctgcgttgtgtactgcttcacctgctttgaggctgcatttaccttgggcttgccaggcaggcaggaataggctgtgggcaccgcaggcagcacccccttccgagccatctccagcatctcctcctggtagatgtggtcctcatttgggctgcggcactcgaacaccggggtcatgcggcctccctgcactcctgcaggagtcccgggctgttgttaccatgttggccagcagggcgctatggctcaaagccgaactggaattctcacttcactcccacaagtatcctagctagttaatagcattatccccactttacagatgaagaaactgaggcccagggcattccaatcactcatacatagtcacacaactgaaagtgcagatgcaggattccctcagcccatcggaggtcaaaagcagggactttcccgttacctccactcccgagagagggagccccggttccaatgccggagacaggaaggcggccgttctcacccacataggccccacacagggagacaaacttgggaggccttccctccagagaggtccaggaaccgtttgtggggctacggttctgctcctaggcaggcgctggcctctggtaccctcccacctgggaagcctccagccacacccttttgctgggagtcatggagccgctgctgccagaaactgaggaagggagcgatgcctgtgccaggcccgatgaggacacgaggatgggaggggtcctcggggagccggaagccgctggcgctgaagaggacaggagaagagggggccagtcctcagacaccccgggcccacgcacacacaggatggctggggagctgggcctgtggggagcggtcgtagcgggtggagagcagctcctatttgatttcccacgccctgcaggcggcttcacttctgtccagccaccagcacctcccccaggtccttctgaaaaagggccaagctcactggactctgggcccttccagctctgctgtcatcgctgtctctgctagagacagccacaccagtgtgaccccagtgtcttctttgtgggccaaggagccccgagcggcacctaaaccccagatccctccctttcctccccgaacctccaggggtcggcggtcccacaggggacagagtggaaggggtgcttacttccgcacaaagcaggacacttggtcttggggcttcagttgttgagccatgtgccgcagacgccgtggtgcaggggaccctggccatctgcaacgataccacaaagtgaccaacgtccccccactgcccatgcgcaaactgtaccagctgctccgcccacaccacggcctccttggacgcccccactcaggcactctcaggactcaatgagcagctctttgtcctcctggttctgagatccacccgctgtgagcccagagctgaggaaggttgaaagggacttagagaggttgcgagttgctccatcttcaacgcagaaagtgagtcccggagaggaagagtgacttggacaaggtcactcaggtcatggtgaaatcaggacagctcagcttccctgactcctactccagtgctccttccaaagagtttctccaggaacactcccagctcaccactgagctccactgacagcagcaggaagtggcccctcggggtggctactgctgtgcgtgctcatgagcgtggcccttgctggttgcaaccctgggtggcggatgagctccgcgcgtttcagcctgctctggcacctcgctttcctcctcagttgcccctcctgggctggtagaaacccaggaggtttctctgggttgcatttcttttacaatggcccagcacttgcaggaggcctccaaccaactgcagaggtccccctggttttcctcgggattaaattttgctctcacaggacgtgtctgcctctcctctcctggtctgggtgggtgttctctagcaggacaaacagagtctctggccagtttttagaaactgtgtttttgtttcctagacagagggctcagaagtataggcagctcccagctttgccaaaccaagcaacactcagttacagagggcagggcggggggcagaggccagtggtggagccaagaccacctgaaagagatgttggcctaccactctatggcagcgtcaccccctcttcactgtcctcagtgacgctgacctttccttcttggcttctggacaatgagaatcatctaattatttctacactcatctctccactgctgcctctagatgctccctgagggcagggctgatgtctgttgtatttccacacctgccccagtgctgagcacggagagatgtgaaataaaccgtcactgaatgagctcagtgagtgagtgaacagccagtgcagaatctcccctgcgttcaggctgcacaatcaggaagactaaggaccactgggctctcaccaagggttgggtgctctccaagtctgatctcattaaattgtctcaagagtagtgggacagtggagtggtggaagacttggactcagcagttagaccacccaggtccaaatctcagctctccacttactcacagtgtgactttctgtgccacctgtaaaatgcacacagtacctaccctacatggtaactgatcatatacatacagaaggcttggtttactgcctggttcatagagctgtctcccacatgcctcctattaccattaacaactctgggctgtaggtgttccctccctccttgaactgatgagggaactgaaggggcagagcgtgactgctccacagcctctgccccaggctcacctcgagtgtggtacatgagcacggccacagtcaggtggatcgctgtgggcgtgtgatcctgggaggagctgatggagtaaaacctgggcttcagaatggggagcagggagagcaggaagccagcagacacctgcagggatgggaactcctccagcaactccaggaacgtggggctgttggtgaacttccacttgctgtactctgaggactgaaagccaagggtgatgtgagcgactcagggcgcctgccctgctttggggaaaaggctgtcacaacccagtattcattcatttcttcactcactcaacaaacaagtccatgtgccaggcactgtccagggtgctgagactaccaagcttaagaagaaatagttcctgtcctggaggaactcagtccggtacacttatctaacttatgtgacttccactgtcagcaactcatgggctggggtcaaatctttgttgaatggcactttccccagctgtcgtatcctaggcagtttgggtggtaggtgggcaaatcattaaaaacaaatcaaaatctctagtgagaaaatctttttcattgtctttcaatcttcccgaatcctttgaggggtctgttgctaggctaggcttactctcaaacccttgtaaatccgtccctcctgcctgaaaacactctccctcagcccctgcttttatcaaacagagcaaaagcagctctcaagctcagaaggtttaccactgtagaatttaatgatattgttttgttttattgcatttatttttgtgattactttccattaatggcaagtgacattatttttccatttagagtgatttaaaatttttcttaaaacacaggtaatcaaattttaaaaactgagttgatttctatgaaaatattaagtaatggtgtaggttctacacagatatgacactatggaacagatggttcctggaatttgggaaatgttgatgggcggcgttccctaacctgacactgcttagaacattgatgggcggcattccctaacctggcactgcttagaacgttgatgggtggcgttccctaacctggcactgcttagaacgttgatgggcggcgttccctaacctggcactgcttagataggggagacacctctgaacacaatagtgtttgtagtgccatttagatctactgggttctgataactcatgggtctttttttttctttttaaataaataattaccttttcttgatcactattgtataaaacttggaaatacagaaaaacatgtagaataaaagaaaatatagaaaaatatatagaatagaatgaaaaatcactcatcatctcgccactcagaaataaccactcctaatatattggtaaatgtttttctctctgtgcaccaacatagctgttattatagtacatatattttatttttgtagcctgttttatttccttaacctcatagtataagcatgttccatatcattcaaaattctttataaacatggttataaatggctgtaagatatttaatgtagagaagcctcataatggatttaatcattccctagctgttggacatttaactattctccaaatgttgggttgtttctggttctgcctattatcatgttgtgatgaatacatttttgtttgtttgtttgtttgtttgtttaatagacaagtctcactctgttgcccgggctggaatgcaatcatgtgatcatagctcaccgtagcctcaaattcctgggttcaagcaatcttcttccctcatcctcccaaagcactggaattacaagtgtgagccacggcacctggcctgaatatttttatgcacagctctttgtctttattttagatggtttccttatagtaatttcagaagtggcatccccaaatgggaagattttgtaaggcttttaggatacatattgctggactttttttttagaaggatgaaacatgaaggtattcagatcccctggacctacatgatgggacataccctaatttgtgtgtggggtggtgttgtcactagaaagagctcagactctgctacattgggcaagttacccaacttcaccaactcctgttggtgcaggtctgagtagtcacttcccagaaatccaagagtgactgttcttcacagctaggctcatgagtgctcatattttagctttaaaagtacagatgtgggctgggcatggtggctcatgactgtaatccccgcactttgggaggccgaggtgggtggatcacttgaggtaaggagttcaagaccagcctggccaacatgataaaaacccatctctactaagaaaacataaaagttaactgggcatggtgatgcgtgcctgcagtctcagctacttgggaggctgaatcaggagaatctcttgaacccgggaggcagtgctttcagtgagccgagatcgtgccactgcactccagcctgggcgacagagcgaggctccaaagtacagatgtcattaacttcagtttgtgttatttccctttcacgagaagggctcaaaaaatatttgggaaaactacttgtctcaacaccctaaaatgcttttttttgtagcagaagcaggaaaggtttgaccaaacatacctgacattaggaagaaatgcaacaggcactcatgcttcctggtgtccacgatgcatgtgccaggagccgagcagagggcctggtgttgagcatttctgatcttcccaagcagctttccccaccatggattacacaaaacattggttctacaggatgctaacaggtattccttgcaaaaaggaattttgttgtttagaaaaactgagttaatgaaagtggaacccattcttttgttatttgagaattcccaagatgaggatatgatattgagcatttgccaaactcacttgataataaaaaccttttccatctcataggattgatgttccaaagaccaaactttgagaatcactgctgacaacaagcttacaatataatatttctctttgtatctcacaaataggaaagctgaggtcaggtaaattgaccaagatagcaaaacctagtgattcaaggactcagggtcagaacccagagccacctgacctcaaacccatgttctgttccactctctccccgaaaggggctcagactgtagggtgcccctgacccaagtgagtgcctgaagccagagggcgaatatgaaatcaatatcagagcttgaatagagaatcccaaactgactgtgttgatcctggagactgggccacactagaaactgatgcagggtgaataagccaaggaaatgagcagcctggaagctgagcatgaggaaggcagttgggataaattttggggactgcatggactgctgtgtcatggaatcagctggcttatgggggaacaggattcatctcttgtacctggggtaaggtggagagaggaggaggaataatattctatttgagggctgcccaagagtctcctcttattgcctcgcagctcttgactacgttaattctccatgcctcccactatgaaatcatcaagtattcttctgtctcctgttgtccccaaagtctcagcctgggctgttttcttctagggctctgcttttccacagctttaaaacctctccacgtgcattattctggcttcagaggtgtggaagaaatggattctgataacgcaatagcataatatctaaagcactgctggtccatgcactcgacaaagattcatgtcccaggcgctggtctaggcaccacagatacattagtgagccatccggacacaaattcccggcctcatggcatagcccttcgctgagggagagacgataagccagataaagaagtcaaatgttagacagtgatccgcaataaagagaaaagggggaggggcccgacatttcagattgggtgtccagagggccttactgagaaggggcttttgaatttccatcatagccttttgagcagagaagggatttaacatttgctgcacttctggcagctgacaggcattgcacacttacatatcccatattttcttttcccctgtaacttaacagatgaagacagtgaggctccaagaaggcaagtcatttttcctcattagaaacttgttctgacaccagaaagcccaccctctctctgcaatctcacactctcttcttgaaataaccaggccagccactatgttaccccattttataggaaaggaaacagaggccagagagccttggaggcctgcggagctgggactggggttcatgtcacctaacgcccagtccagttttctttctgctttagtggactgggagcaatgagtataggattggttttttgttttttgtttttttttggttttggttgtcttttgttgttgttgttgttgagatggagtctcgctctgtcacctagactggagtgcagtggcacgatctcggctcactgcacctccacctcctgggttcaagcgattctcccacctcagtctcccaagtagctgggactacaggtgcgtccagctaattttttgtctttttagtagagacggggtttcactgtgttagccaggatggtctcgatctcctgacctcgtggtctgcctgcctcagcctcccaaagtgctgggattacaggcatgagccaccgtgcctggcttgttctttcttttttactggcgtacagaaagaaacaaaagactcaagggcttgtcaaaacttctatgcatgtgaaatgatagaagttgacttaacaagaagcggcagtgaccaaatgactcagcacccgattgcaccgcaccggtctcttgaacagctgcgaggagactaaagccttctaaacgcttctggtggaaggatgggccacaggccagcaacatgagcaggacctgggagcgtgttagatgtgcagaatctcaggcctcatcccagacctactggatcagaatccacatgctaaccaggtgatcatatgcatgttaaagtgtaagaagccctgctctgactgccgcatcctgtggtgcaatgaggctgggtgtccccacagagcagtcaggaagcctaggtatagttataggaagactcatgccaggtaggactgcggagctggggtgacatgggcagaggcctctgcagaagcttagctctggttcccccagcagcggcagctcattttagagggactgaaggggagggtatgggatggtggtatttctgtttcatttactgtcccattgagactaggactggtggaagagatgttctctatgacctgctgaaacctgagaaggaatctgcaggaataaacaaagcctttagagcttactaattctgatatttggaggcctttggaaggtttaattcaatttattatttactgatgacctaccgtgtaccagacattgcactaggtactgggaatacaaagggaatcaaatgtcctagtgttgtattgggaagggagggtcacatttcttgcatgtgtctgtgtttggggatgagatgagtgaggggcaggcctgcagggatagagcaattgcatacttggtgtcacctgggtcccgaagggcaggacgaaggacagattaaggaaggcttcctggaggaggtggctcctaagctgtcaagtaggctaagaaatgctctatgcatgggctacccacttccatacactcgccacacacactgactcacatgcactcacaaactcccacccacactcacacagcatgtatacctattccatccacacacacactcacatgcatccacacacaatctcccacccacactcacacatccgcatccacacacacattcacaggcatgtatacctactccatccacacacactcacatgcactcacgatctcccacccagactcacaatgcacatccacacacacactcacagcatgtatacctactccatccacaaacacatataggcaaattcacacacacccacacatgtgcacaggcacctacacacacacacaccacatattgtagtatttttctggggaaacagagaaacagtcactcttttgaagaacctcagaaactgcacaagaagagctcttcatttatcatcaaaattcagataaagttgaaggtctaacttccaagaagatctagactgttttccagattgttataaatgcatcttcggatatgaaggagcacctcacggttgcattcagatacctcctgggatgtgatttagtcttgatgattatcattacatgtcagtgaatatagtttgatggaaacttttagggaaacaaaaattttcagaaactgtgtccagatttactgtagtagtagtaaactctgaggatacattttttgaccaggcaactattgttgggggccctatacctgacttggagaggtgtgtttgtgccttttaggtaagatgaggaatagagggccctcagacttaagagctacatgtgatatttgagataaattgatccttaacatttttcccaagtcagagttctcattacttgtctccttgatgccaatagagtaaaatgcaaaatggctcaccacaaatgcaaaatggctcaaagcccctccctttcaactggccacatcctggctttcctgggctctttctactgaaccaagctctgtgttccaagaaatcatcctgttctcaaatctctgcacctcgttctctgccgaagccatgcccaagcagttccctttgcctggtatgtttccctctcccattttcctgcaacactgcccctcaacgtcttcaatgcgaagttccagcccctccttctagaagcttccagaagccagtattgggctttggcattaaacagcctgtgttcaaactccacctctgtcattgacagggtgactctgagtatgtgggtccttttgagcctctgttttctaatctttaaaaaaaagggaggggaaaatatttacttcacacttttatttagtttgtcaaagattaaatgagacaatgtgagtgaaactgaccagcatacaggagatagccaagaaatagttcagtggataatggcatttctctcctgatgaagttggattaaccctctcttctacagtccggaacgaactgtaccttatacagctgccttggatctgcggtttctgggtttgtgaggtgggctcatcttggtctcttgcctggtgactttagcataatccatgctcaaaaaattaaattaaatgaaatagactctttgggtatcgctttctttttttctgccacattccttctaacagccaccgagcctgaagacagcaaagctgcccagacttttctcctgggctccagcccctcctgtctgactgctcaaaagaatctcagcaagcaggtctcccaggcacctcaaatccagcctgtgtaaacctgagctgcctgtgtccacactcctatatcctagaaccatggttctcaaatgtgggtgtttttgccccccaggttacatttggcagggtctggggatgtttttctttgtcacgacttagacagagggtccttcctggcgtcttgtaggcagaggtcgggggtgctgctgaacatcccacactgcataggacagtctccgtaacaaggaatgatcctgccccaagtgtcactagtgccgggttgagaaatcctgatcgagagggagcctttacctggtagatcaggccattgcaccgctctgctcaccatcccccgggactggtgttgtggaagacaattttccacggactggggggctggggggaatggtttcaggatcaaactgttccacctcaaatcatcaggcattagattctcataaggagggcacaacctagattgctagcatgcgcagttcacaatagggttcgttctcctgcgagaatggcatgccgctgctgatctaacaggaggcagagctcaggcggtaatgggagcaagggggagcggctataaatacagctcaccgctcacctgctgctgtgcagcccggttcctaacaggccatggacggtgctggtctgtagcccaggagttggggaatcctgctctacagagtttccaacctcagagatgaagcatcccctctgtaagtcagaaagaaattattcaagtaggagaattaaaacaggatcacagagagggaggctgaagaatttgactttctgtgtttacttgtatgaggaaaaacagtacataaaggcatccacagtatttaatttgtttggataacagttacagataaacaggtacaccccatatacaattactaatactttttatacagttcatatttcagtacatcaacactattttatttacactctatttatgcacattaacatctttctaaagtcagtgcattgtcaacaagttttatacagtcatttacaaggtgaatgtggttaatagttaatttaataaattttccgctagttcatgaattaaaaaaattaattacaaccagtataacaaacacagatcaaacaacattagtagattgtgctacctgcttaaataaaacatctgtaaagaaattatttaaaatcttccactttttaatgggacatgtccaggtaggaaaggacagattttatataccgaaaatcttgaactataaagtatgcattttgtctgactttattacattagataatttaggccactcctacctatttgcaattatattttttctgaaaaggatttcaatttaggtagccatttaagataacctttccaaatgctctgagaactagatattaatagttactggcctcagatatcagaacacaaatgcttagttacactggtaattactacctatgaggaagaaagtgtagtggaatctgacaattaatgagaatcaacttgcagggtctaaatgaataaacaaagaccaaaaataaggtgaaacatttccttcaagtatatattaaaaaactacaccaaaaaaattctacctgaaataaataatatttatacttttgtcccagtcttgaatatttagaggaaaaaatgaagtaaacaaagaaacataactttcaatgactactgtaaaattttttaaaaaagactaatatcaaaataaaaaaattagtggacatgcaaacaaagcaaaactaaagttgacttcctaaaaccaccaatttcattaaatatacttatgaactcctaatgtctgggatgtgttttgtttgtaatttatagcccttggagccatcaaatacacacaagcaagttcatttgcatgtgttctctcttttttaaagtgcaaaacaaacatggaaaagaaccaccactaattgtgaaacgtgatctagctccgatgccgcttaccttcccagaagctcttgttgcaacatgtgcatgtgaagatggtgcaaatattggcaactgctccccttccctcagcatgggcggggccggggggtgcagaatacatttctgaggatacctgaagtatcctaaatgtaagatgcctccactgggagggccatggtagctggatttcccaggatgtttttctttctactgggtctccctctgggtggaaggcacatagctcttaagagagcctccctttcagactgaccactctatgcccctgccaccaatgactggttgtatctcaaacataaacacaacggcaaaaacaaaaagcaagaaagacaaagaaagggtatggaaactttaaaaaataaattgaaaaatcctcgcccatgccgtaagaatcatttgcacaccttcatgatcttgctttctccatcttgtcaacagaatggaataaaacttcaggaaaaaggaggtagcatatcatgtcatccctagacaacattacaattttttgttttttactttgactccaaggaaatctttaatatttgttatgattattgataaactctatactcactacatatttgttcatatctggacaagcacaattgaattcttatttggtcccaggtggctggtgccaaactttttgtttacaggctaatggtgggatctgcctgaaagttctctatcagacaacttgcatgagacttcaaaataaaattactactactcttaaagttaactattttaattagaatttgtattctaacaggataaaataactacatttagcttgcctctcagtgacacttttgccaagtatcagctacaaggagtcatctccctccccaccaagctatctagcagccagagtggtagctttactgtaacacacagtacttttcgtaatcagactcaaagtcttcatccatactgcttgtgtctgccatctttttgccatcaatctttggcagaaattgtgcgtagtctatcctctgctgctcatagaaaagaatgtaggcagagtcggtgtcaatttcatcagggtgatgttcctgaagggcaagaaaaacctttaacaaaaagccatcactattatggctctaaatccttgccaggaaagggaagaccaaccgtctgtaattactaaacctgattgcttccaataagctcactagtttggctgtctcacacctgcccctttaaaatgagccccattatttccaatgtttgctttggagaaaatattttgaccatagacaagtcaaaacagaatgacctaaaaccccatcaaattctatttatttattttgtatttatttatttttttgagatggagtcttgctctgtcaccaggctggtgtgcactggcacgatctcagctcactgcaacctctgcctcctgggttcaagtgattctcctgcctcagcctcctgagtagctgggactacaggcatgtgccaccacgcctggctaattttttgtatttttagtagagttgggctttcaccatattagccaggatggtctcgatctcctgacttcatcatctgcccaccttggcctcccaaagtgctgggattacaggcgtgagccactgcacttggcccaaccccatcaaattctaacagtccagaagataggagctttttgcattaactaactccttttttttttttttttgagacagagtcttgctctgttgcccaggctggagtgcagtggtgcagtcttggctcactgcaacctccacctcccaggttcaagccattctcctgcctcagcctcctgagtagctgggattacaggcatgtgccaacatgcccaactaatttttgtatttttagcagagatggggtttcgccatgttggccagtctggtctttaactcctgacatcaagtgatccacctcctaagcctgcctcagcctcccaaagtgctgggattacaggcatgagccactgcgcccggtcaactaactctttatttttcctcactactcatgttttcattccctactctgcatatcacttttgtttctttaatactgacagcatctatatattgattctaacagaaatatctatttcctattcaagagatagtccattatttcaacaaatgttctccagttctgttgatattctgtttctaactttcattcaaagattgagaatgtttacctcacagatgctgccattgtagcagtaccacttgcagtttgggtttttggcataagtgacgtaatggcccccactcagaattcctgaatggcactgtaagagataagagagtggatgtatgttagtagttaactgtactatggccagggtatagcactaggatctgagcaggagaacagtgatcatgtaaatgatcagtaggtgagaaaatattttagaaccctctaactttctctaaaaccaaaataagcaaaaagcaaaatacaaaagtcataagctccaagtcttgtgtggataaacaatcattttataatgtaattactattattattattattttgagacaggggcttgctctatcacccaggctggggtgcagtcaagtgatcacaactctctaaagacttggcctcctgggttcaggtgatccttctgcctcagccttccaagtagctgggaccacaggcaatgccaccatacctcgctccattttaaaattatttgtagagatggggcccaggctggtctcaaactcctgggctcaagcgatcctcctgcctcagccttctaaagtgctgggattacaggtgtgagccaccacacctgggcaggcccagatttctacgttaactttctctatcactaagctcaatgctaggaaataagcaggacctgaaaaatacttgctgatgaatacatgaagacaagtgaacaaaacacagaccactctccgaaaaccatacaataaaccacttactgaaattgcatatagattataaataggcttaatatgagtgtcttctctttggtcatcagtgctgtcttcttcactgtggtttccaagctgaccattgctgtagccattgccatatgcttcatgctcataaaggaatccattgcccaaagctacctcgtggtcctgaggagtgaccagctctggttggctgcccccccgcatatgccctcagctcaaggcatcagccagctcacagatctgcccagccccattctctttgctggcatccaagttcttcttactacttgacagtttatttttgctgccaatctggggcagccggagcctccctttgctcctccccaaagtccgtgggcagctattagggctgctgtttttgctggagggacagctggttccactttttcttgatgaagaaggagaacctgtgaacaggacagaagaaaagattcacaaatccaaatgccacaaagtaagccagccccaaatgctaactctgaggttagcttcacaactgtacacacaaaggtaaagacaggggagtcgtgactggctaccctttagttcctattatgtagcaggtaagttacatttttgtcttcttcaatgccgagtccctataagcaacaatgtcctgaaaatgtaaggtaggttatagggactcagaaaatagcagaaagatgatttatgtcagattcagttgaaaaaaatctaattattaagagtaaggagttttccaaatacatattcctctcctttgtaaaattagacaaaaaatgcgaccaccatttactgagtacttcctattgttaggcatggtactgggaatttcttgctgtccattgttacctctatgtctcacaaaaatcctgtaaggctttaaactttttggttatagcctcttacccctacccccttttatacctttaaaaattattgagaacctttagaacttttatgtgaattttatctatcaatatttcctgtattagaaactaaaactgaggcatgaaaaagtacaatacattagcacagacttcactgtcaaagtgacgatattattccatgtcaagttgtctcttacaccattgtacatatgtgagagaataaaagtgaaaaggcacatattgtctagtatttttattaaaatagttttgggccaggcacagtggctcacacctgtaatcccagcagtttaggaggccgaagcaggaggttcacttgggtgcaggagttcgagcccagcctgggaaacatggcaaagcacaatctctacaaaaaatacaaaaattagccaggtgcagtggtgcatgcctgtagtcccagctactcaggaggctgaggtgggaggattgattgaccccaggaggtcgaggctgcagtgagctgtgatctgtgttgcaccactgcactccagcctgggtgacagagtgagaacctgtctcaaaaaaataaaaaataaaataaataaataaagagttttgatcctctagaccccctgaaagatggggaacctcagaactttcactataaggggacaagacagcagctaccattcctgtttaccatacatcaggcactgtgtgaagtgctttactctccatgtgtcaaactctcaactctgtaaacctggcattatctccattttacagatgagaaaatagattcagggaggctgaatctcttgataaaacttacatagctcaaatacagataggtctgattccagataggttccttccacccaaccaacctgatgttccagaacagaagacagagaaacatatgtagcctacaggagtcccaagaaagcaactgcataaggcccccaggcctcaccttttgggctgctgctgatgttagcgctgagtgaggatgggcttttgctcaggagcatgtcctcttccccagccaaactctgcacatccactttcttcacctctcttgccagaatcctgggcttggagagctcatccccctggggtgtgagtggttgatgctggcagagagccgggtctcgtggtaccaaaaaagcactcggatcaaaactttcccgaggaaatttgacaattttctgtgattttatccactgatcatttacaaattgaaatcgcttaaggtgaataatctggagaagtaaaggtagaaaacatcacattaaagcgttctgaagatacaaaatttacatggaaaaaacaagtcaaatacatgtgaatgtttgggaatatataacagaacatttactcttcattattttttaaagacttcaaaaatatggtttcctaaaggcctctacacaggccccagtgcactggtgtgcttgtgcacacactcaactcagcagcgtggcacagccacgtgactgcgcagtgggtactgcctccaggctcagttgctcttctagagtccacaaagggctagcctgagcttccactctccacagagccagaagttcaccctctcctgaagttcaaattcaccacgttgtaccccttgtggcagttctcacatcacactgaattgcagttactgggctacatgactgctctgcttgttttatttgatgattatatgaaaatatatacttgttaaaattcatcaaactggatactaaaaatctatgcttttaattgtatgttaattatacctcaattttttttaaaaggtctccccctcggccaggcatggtggctcacacctgtaatccccacactttgggaggccgaggtgggtggatcacgaggtcaggagattgagaccatcctggctaacacagtgaatcctcgtctctactaaaaaaaataaataaaaaaacacacaaaaaattagtcaggcatggtggtaggcacctgtagtcccagctactcgggaggctaaggcaggagaatggtgtgaacctgggaggtgaggtttgcagtgaactgagatcttgccactgcactccagcctgggtgacagagcgagattccatctcaaaaaaaaaaaaaaaaacgtctccccctcctccccacccaccttgtccccaagcctgccccttccctctagttcctatctgtggagctagctgacaaccagtgttattaatttcttgtgcatcattccctgggaagcttttctggtctaagaaaaacctacattcagcttcacagagtagtgtgacagagacataattagaataagaaaatacggctgggcatggtggctcatgcctgtaattccagcactttgggagaccaaggtgggcggatcacctgaggtcaggaattcgagaccagcctggccaacatggtgaaaccccatctctactaaaagtacaaaaattagccaggtggtagtggtgcatgcctgtaatctcagctactcaggagactgaggcaagagaatcacttgagcccaaaaggtggatgttgcggtgagctgagattacaacgctgcactacagcctgggtgacacagtgagaccctgtctccaaaaaaaaaaaaaaaaaaaagaaagaaaatacatataaatatctgattaaaataggccagtaccttacagttacactgaccttaatgaataggaagatttgtcacttcaaactctcctgacaaacaaaaggacagtctcctaatccatgaagggagaaggcagaagtaaattaaatctaaaagaacacacaggccctagtgcactggcgtgcttgtgcacacacactcaactcagcagcgtgccacagccacatgactatgtgcagtgggtgttgggggctccgggctcagttgctcttctagagtccacaaagggctagcctgagcttcctctctccacagagccagaagttcaccctctcctgaagttcaaattcaccacgttgtaccccttgtggcagttctcagatcacactgaattgcagttactggtctacatgattgatctcttcttctaggttgtaagttcgttaggaaaaggaactaccaaatatttgtagaaagattcatctctgtattcaacataaaaaccttgtacagaaagtgttttaaacactgctgcaggaaaagtcttattctcaaaaataacaaaacctcctgtttgttcatgtcttctttcttttatgctagattcctgctctctcagaggcaggactgtaacataccaggaagggtggaagcctccagagatccagcttctttgttgctaaagcagtgggtcttacacttggaacagtagtatatctcatcttcccctagctcttcctcactggtgaaagcacggagacagctgtccaggttgatgggctcgacttgcactcgccaactctgctccacactctcatgctcatctacaacctgtaggtggagggaacaggaggaaaggggtgtgtgggaaggcatttaaactggtgatctagctatgcatcaacctctcggtcactcacccttattttactctatataaggaaaaagaaaatataacttgctgggtatggtggctcaggcctgtaatcccagcactttaggaggctgaggtggggggaattgcttgagtccaggagttcgaaaccagcctggccaacagagtgagaccctgtctatgtgaaagaaaaacctaaaaattagctgggcgttgtggcgcatgtctctagtcccagctactcaggaggattgcttgagcctgggagtagaggttgcagtgagctgtgattataccactgcactgcagcccagatgacagagagagaccctgtctcaaaaaaaaaaagggaaaagaaaacacaacccaaactagagtctgagcaaatacagcacctacacatttattcacaaatgctacactgtaacattctggataaaatttctatttatatgatcatagcttttcttgaaaaatttttgaatgcttcaaaatgacaaaaagaactgcatttatttaacaactttggaatcctataagggattacatgtgagctggccctcaagccaggggtgatgatagtaagccatttatctttaatcagaaagccagagcattattagtatgctgcagagtttacagaggctaggagaaataacatgaaacacagaaaccagagctggatgaaataagggcacagaaaagctcaccatgagaagacaacacagcagagcatgaaacaccacagggtacaactcatttacatctgatcccatgtaacacagagttatcagaataccaagtctatacttatctgtctcctccctcatggggcctttttatctgagatggcaacaaaaggaagaacaagctcaagagtgtgctgcttttgttgagaaggcccctaatacccacccaaacctttggggtcctgttaatcagcatgttaggctgtggagcaagaaggagttaagtgtaagaaaggagagagagcaaagaatgggcggggtgcagggatatgtgttgggggtggtgtagaatgaagaaggaggagagaaggaaggatctagagtgcagcagaaaagaaagaatttttccctctccatgcctggctgctacctgacaaacaatcaagaaccatagagctgggatccttctgtttgtccctctaatgtatgggaaggtgggtgaagcatcagggttatgaatgctaccataagacttcacacagtttatatttgtgtcccaaagcagagcccggaccacaaggcccatactgactgcctctctgtggcaaacgtcacatatgtccatcacccaccctatttattgctcctcacccttccagaggtgaacttcctccatgaatttcccttcctgaaactcacgatgggaaccttaggctgcctggaatacaaattggcacagctcaagacacgcagcttagcatgggttttcaggcgagactttttccctatgtgagagtcacgaggctgtcaaatgctgttataaacaagcaaggttgggtttgatcatgcagttacggttctagcactgcataattacccaggctaaagagctcatttaaaaaggggaacttagaggaaaattctttttttagaaaaggacttgggttatagacttcttttttgagtacaaattctgtagtaacaagatattaactgtcatcatcttttgaactggtcactcaaggaaaaaacacgtgcttcaaaaggaaacgtgctgtatcatcgttgttggaatgagtagaaaaaggggtgtatcatatacgatagtgtttcctttctcatggccagttaaatattatctctattatctctaccaggaatactttatggccaaccacaaattagagtaagctagtaaagaatgttgaattttattgactatattttctgtggaacacaggctacagtgctagatgaagacagggaggaaagatggctgataaacaacatatttgtggactgtactgacagtaatttctatttatcagtaaaagttcccaaagtgataaagattccctttacctcttgggatctatgcttagatcctctactattgtttaaacagtctatgaattacttataggcaccctcttctttttcagagttgctttaaagctcatcttaacacaaaacacaggaaatgaagtaatagtcttcatataagactattaaaaaaaaaaagagagaggcctaagaatttgtctagtttaattttctttttttctttttttttcttttttttgttttgagacagggtcttgctttgttacccaggctggagtgcagtggcgagatcacagctcactgccgccttgatctcttgggctcaagcaatcctccaacctcagcctcccaagcagctgggactataggtgcacaacaccacacctggctaatttgtgcattttttgtaaagacagggtgacatcatattgcccaggctggcatctagtttaattttctactgaggaatctgaggtccaaacaggagagaaatgtaaaggataagagtgagtgtccctgtatttttttctgattactatgtataatattcatgtggaaaatttggaaagcagagaaaaatgtaaaaaggcatggaatccttttatattcttaatacaaaggcaaccactgtcaaaattttggcagattttcttctgtcctttttcctaaatagtatttttttcaatattgaaggtattatttccagtatatgcaactttatgtcttgtttttaaaaaaatgttcacatatcataagcatgttcccataaatgttagcaaaaactcctggtaatcattttcaacaactgcattatagtttatccaatgaatacaccatgctttatttaaccattcctctaatgtgagacaaatataagttgttaataactttttactctcctaaaaaatgctatgatgatatttgcctgcaaattatggagtaattacagagtattctcccctcagataaattcctaaaagggaaatcactggaataaaaaatataaagcatatggacaataatcccaatttaaaaagatgttaatgtatataaatagagtgtaaataaaatagtgttgatgtactgaaatatgaactgtataaaaagtattggtaattgtatatggggtgtacctgtttatctgtaactgttatccaaacaaattaaatactgtggatgcctctatgtgctgtttttcctcatacaagtaaacacagaaagtcaaattcttcagcctccctctctgtgatcctgttttaattctcctacttgaataatttctttctgacttacagaggggatgcttcatctctgaggttggaaactctgtagagcaggattccccaactcctgggctacagaccagcactgtccatggcctgttaggaaccgggctgcacagcagcaggtgagcggtgagctgtatttatagccgctcccccttgctcccattaccgcctgagctctgcctcctgttagatcagcagcggcatgccattctcgcaggagaacgaaccctattgtgaactgcgcatgctagcaatctaggttgtgccctccttatgagaatctaatgcctgatgatttgaggtggaacagtttgatcctgaaaccattccccccagccccccagtccgtggaaaattgtcttccacaacaccagtccctggtgccaaaaaggttggcaaccactgatgtagaacaagattcctacagtgggtattaccctacagaggtactactacagggggtagaacaagatccctccagtgaccaggtgactttaaacatggctcacatcccttttagaaagttatggcagggaagcaagtagagagcaggtggtaaactgaggactggtgcctacatcggtaccaacactgggtcctacagtcacttttgtgcagatcaggagatgaggtgaagagaaggaaagcttctcatttgcataatgccttgaaatgacccgaggtttctagggggcaccgagaaaccagagatgtaccctgttgtctgtctgggagatccaaggggacagctggcagtgttgagaagagatgaaggtgacagctgtaggtccttcaccctcagcttctatttgttcacctataaaattaaaataccgaacactcaggcttgtaagaattaaatgaaggacacaaatgcctggcacagttgcttggtaagtgctcaatccaacgatactcaatcctattttacaaaaagggttttttttgtttgttttgttgtttgtttttttacctccttgctataccgatgctaaaagagtttaatagtcctctggtcacattttccaaaagcaagaatacacattaaaaatgtataaaatgggccaggctcagtggcttacgcctgtaatcccagcactttggacggccaaggcaggcagatcacctaaggttgagagttccagaccagcctgaccaacatggagaaaccccgtctctactaaaaatacaaaatagccgggtgtggtggtgcatgcctgtaaacccagctacttgggaggctgaggcaggagaattgcttgaacccgggaggcagaggttgcagtgagccgagatcacgccattgcactgcagcctgggcaacaagagcgaaactctgtctcaaaaaaaaaaaaaagtataaaatgaaacatgttgaatcagcagcagtggcagcttgtttaaggaaaggaacaaacaaaattaatacagaaagtcaaaaaatgaagcacaactcttttaagtgccagtctgtttttaggtttctttcttttttttttttttttaaatagagacagggttctctgttgcccaggctggaatgcagtgaggtaatcacagctcactgcagcctcgacctcccaggctcaagcaatcctcccacctcagcctccccagtagctgggaccacagatgtgcaccatcacacccagctaatttttgtattttttgtagagatggggtttcaccatgttgcccaggctggtcttgaactcctcggctcaagctatctgcccacctcagcttccgaaagtgcagtgattacaagtgtgagctgccatggctggccaaggctgtcttttaaaaagctaaagatgtgttggttcaagaccagtctgagcaatatggcgagacctcatttctactaaaaagaaaaaaaaaatcagctggctgtggtggcccatgcctgtagtcatcccagctacttgaaaggctgaagtgggaggatcgcttgaacccagaaggttgaggttgcagtgagccttgattgtgccactgcactccggcctgggtgacagtgagacctcgtctcaaaaagcctcggaaggagtggcctagggagatgagcaagcattttgtttctagtttctgaatggccctgtgcattgagagaggtcttcggcctcccagcctctctggctgaaggtggcgattctgcatggagtctctccaccacttggtggcattgctcacagtgacttcctacttctaaacaccattgaattggagcaagtagatgatttgccacatttttcccagctagtttggaggctgaatatagaattttactggggcacaccagaatgtgtacgttggggagcagcgatccccgttttccttgataatctgccgacagcttccttagtattgaaatcacaaagtcagaaatgcacacacctctatgatgagagatccatacagaagagagcaacaaaaagaggccttttaagtttgccagacttcctgaccagtgggaagcaagagagtagataagtgtgcaacaggcacaaacccaggcctataagaacctagttgggaacagaatgtaagagaatggggagcgatggggactctagtgtgttctgggcacgtgcccatctaaagtctccatgtgactgttgccctgcaggaatgtgggccccagtgttcaccaaacctttttgtttgtttgtttttttcccgtgaagagaagccagaaacccagatattgatacaaagtatccagtttagaagtgttggtagtttttttaattttgaacattgtgctgcccaaagaaggtatctgcaagccaggtacaaaccagcagttcatgccctctggtgagcagaaatgtcggaggtcgaattctagttctgctgttgcaacagctgtaaacgaaagtcttcagatttctaatgcccaatggaaatgccactttatttccaaaggttattaaaaggaatagttcatgtatgtaagtaggcacagagcttgccacctattaggtactcaaaagcattcttccttcacttaaggaaacaatacaggcataatacaacaataaagttacgatcaagttcattatcaggaggcatacacccaaacaataggggagtgagcacctaccacgtacagagctctctgctaggttctctgggggcagcagttcccaacctggcaattcatcggcatcgtcggaatcagccagcagcttgttggatatgctgagtccagagtcccgcccatattacacctaacgttctgtgcctattacacccagatttatgagatcctcctctcccatgcagtcaaagaatctgcattctaataagttcctcagaggaagctcttttgcagccagtttgcactggtctgtgggttggtcacttatggaaaccactgctccagggaatgaatcatgatttccagtctcattagggaaagatgatatgcatatgcacacatgtaaagaggagtgacagtaattagccaaaagctctgtggacataattgcctctgatgaagtgctgactgatgacatcagacagtaggctattgacagtgtaccccggggaaagctaaatgcaaaagagaagcgaactgcctcatgaagtgagatcaggattacacggtcagaaatgtggagagggtgattcagatggacaaaggagcagaggtaggattcaagtgatgtgtttcggaggcagtgcagcctgtttgtgctgagtggaaggtgcacgaggaacatagtagacggtaacatgaaggcaggagctgtgaaggcctttgaaggtcaggccagttgtaataaaactatttcacattgtcaggtatcttgcgatggttgccaaacatttttctatggtttgcataaatacatatctattttatttatgtatttatttattttatgtatttattttatttatttatttattttttgagacggaggttcgctcttgttgcccaggctggagtgcaatggagcaatcccagctcactacaacctccgcctctcaggttcaagcaattctcctgcctcagcctcctgagtagctgggattacaggcatgagccaccacgcccagctaattttgtatttttagtagagatggggtttctccatgttggtcaggctggtcttgaactcccagcctcaggtgatccacccatctcggcctcccaaagtgctgggattacaggcttgagtcactgcacccagcctattttagttttctttgagacggagtttcactcgtcgcccaggctgcagtgaagtggcactatctcggctcactgaaacctccacctcccggattcaagtgattctcctgcctcagcctgccaagtagttgggattacagggtcccttgaagcccaggccaaatggccctgctgtggccttgccccaacgcacccccccactttctctgggtcagccccaactcgtagtccagtcctcccagttcctctgcttctctgagtataacttgagctgacgtgtggtgcattccagttacctgacttacatcaagctgtcaatggcaatcaagcgtaatgagagcatggccaaaggtctgcagagggctctgctgcagcagcagccagaggatgacagcaagtgcttcccccggccccaggacctgatctggctttatgacatcatcttacagctgacccttgaggaccgggaaggcaagggcctgtcgttttcctttgcctgtgtcagacacaaaatgacttaactttgtatcatggaagggctgtgacaagcaggacctgttagtagctgggaaaagacaaaggtcttacaccagttccacagtctgtgagcccctacctctcagacatgctgatctgcagagaatagtgacctcagatcatcactgagcacttcacctgtgtaagatgctcccaggtgccatagagcatctgagacctgaatccatgccatctcggcccccagggagtttgtcagtcagtaggactgtgagacacacacagtcaaggcatctgagtagatgctaagcaaaataaaagctcagcgctggaacagatcccttccagctaagatgggccaagaagtctctgaaggcgggtgagctatgagttgagttgtaaagggcaaatctgtttccaagatgagaggggaatggaggcgacagcaggtgtggctgctgccaggtcacttcacaggcttttccccattgtattgacctcgggctttttttttctcaccattgtctgttcttacaaggtcttctgtgaaaaattcaacctaagatctactcttcatgaattttcttgttgcatctgttgtacagaatctggtggaattgctccagcttcctggtttagaggaagacaaagccttccagaaagagataggcctcaagattctggtgttcaaagcttacaggtaacgtcccatgggatgggcagagttttcctctgcctcccaggttctgtaagcattgggagcatgacccagcccacagcagatgggatcattggccttgagtgtatggttaccttgcctgtgatcagaggaaggtcagcccagcacgttcaaggggagtttctaaaggctgtggtcagcagtggccagtgatgatgactgccctttggccaggttggaggagtggagcacacacgttaaacttggcttcctcgctgggtgtggtagctcacgcttgtaatcccagcactttgggaggcaaaggcaggattaaaaacttaaatctaaaatgaaaacatattaaaaccttggacgataacctaggaaataccattgcggacataggacctggaaatgatcttcatgacaaagatgccaaaagtaattgcaagaaaaacaaaaattggcaaatgggacctaattaaactaaagagcttctttacggcaaaagaaactatcaacagagtgaacagctcacagaaagggagaaaatatttgcaacctagccatctgacaaacgtctaatatccagcatctgcaaggaacttaaatttacaagaaaaaaaaacaaacaaccccatcaaaagtgggcaaaggacatgaacagatacttttcaaaagaagacataacatgtggccaacaaggctatgaaaaaaatgctcaaactcactaatcattagagaaatgcaaatcaaaaccacagtgagacaccatctcacaccagtcagaatgactattattaaaaggtcaaaaactaacagaagctggcaaggttgtggagaaaaggggatgtttatgcacttctggtgggaatttaaacttgtttagtcattgcggaaagcagtttggcgatttctcaaagaacttagaattgccatttgacccagcagtcccattgctttccccattgctttttttaagtggagttgttgaaggttggatggttgtaggtgtgctgcattatttcttagctctctattctgttccattggtatatgtgtctgctgttgtaacagtaccatgctatttctgttactgcaggtttgtagtatagtttgaagtcagctaccaaactaccaatgacattcttcacagaattaggataaactattttaaaatttatatcaaaccccaaaacagctggaatagctaaggcaattctagcttacttttataagaatatagtgtataatacatagaatatacagcatatatattaatcaactttgttatgggtaaggtttctggtcaacagtagttaatcaggtcagtcagcagttacattacagggaagtcaaaatttaggcaaattttcggctgtgtggggttcagcccctctaacttccacattgttcaaaggtcaagagtactgaaagggaaaaaaaacctaaaatgagccatgtgtgattcaactggaattagaatcaccaggaagaactcatggttttcagtatattctaatatagaaatatcgatgaatataagcatgtatgtttgtatatttatccatctagctgtatttttctgctctgttcactgaggaagcctatgagcaatgacaactacaacagccatacgtatctaccacaattactgcccagatattggtttctaattactgtcccctaaagaaagtcagggcttctggaaaaaaatgaaaatggctgattcaagggctggggcagagaaaatacaaagtatggttgaaacagcttatgccagaaagtaaggaagtattcaaagaacaataaggacagttcaaaaagacatgaactcagcttgaaatggctaccactggtcaaagcggagggaacctgaacagcaaaacaataaattttcccttctcccctatttgttggttggttttgttttgttttacttatccacgtagaaggaatgaaagatgaagacaatcatgatttggcaaccaccataataataattgacccaacaaaaataatcaataaaatgctaaatctagtgggtgagatgtttagagtaaccagatatttacagagcctcaaactatgttcacataagacattggtgaaaaacaaatggtagatagtcactttatcatggacagacctggcagattctcaaccaaagtcaacactggccagtaatggagccaagtaacagcatatgcctccagatatgctgcattgggaagaactcagcctcacttgtgtgaccttcctgccagaatggtataacctgaactgaatcatgaagaaacatcctatgaacccaaactgagagaaaatccacaaaaaactgacccatactcttcaaacacataaatgccatgaaaatcaaggaaagactcaggaatcatcctggactaaaagagactaaaaagacagaataatttgacacagatcgacctcctccaaaggtcagcaacctcaaacatcaaaggtacataggcccacagagatgaggaagaatcaacgtaaaaatgctgaaacctctcaacatcatggattatgaaagtcaacatcatggattgtaaaatcacccatcttaaattatttggctataaaaaatattattgagacaactgaaaaaagtaaaataaggtttatggatgagatagtaacagtaaaccatttttaatttcctgattttgatagttatactataattatgcaagataatgccttgtttttaggagacacacataaaattatttagaaataaagaggcatcatacctgcaacttataaaccattcagaaaaagtctatattatgcacctacatttatatttacctagaaagagaagaggaaaagggggagaaaggataaagcaaatacagtaaaatgttcacatttggggaatattatccaagaatgttttgtagttttcttactatttttctataagtctaaaattgtcaaaataaaacatttctaaaaagaaaaaaattgttaaaacaattgtcaaattataacctattaaatgaaataaaccacaagtaaatatcaaatcaagtaaatgaataaattgagtttgatgaagaacagagatatctacatagtctcgaattacctccccacaaaatattaatactaattaattacaaggtgaaaaagtaacattacagaggagaaagctagcagacaacactgtttgtgatcaatgccaacatcaccagtaaaagggcaaatcaaaattgtaggtcactcatgttctatggggctaacagagctctaatttcttcccgggatggagtgcctgaggggtggggcaggctgccacctaggcctttcaagcttctcagccagttcagcctgtgggcctttggacagcccaaactgaatgggaactgaagggatccccaacacagcacagctggtctaccaaaaagtagccagaatcattctttaagcaggtcccttatcccatttctcctgactggaggagacctcccaactggggtctccagccacctcctacaggcactttcgagccagcaataggtcagtaccctgctgggctggagcttccagaggaagtggcaggcagccatctttgctgtttcacagacttcactgatgatacctccagctatgggaaaaactgaggcaactagggtatagtgcgaacccccagcaaactgcagcagccctgcagaagagtggccagactgttaaaagaaaaacaagcaggaaaaaacaacaataacaatttaaaaagccacaaaaaccccatcctcaaggtcaaagtttaagatagacccacagagatgagaaataacaccaaaatcctgaggactcgaaaagccagagtatccctgcaacacctctccagcaagggctcagaactgggttgagcctgagatggctgaaatgacagagtaggcttcagaatgtgaataacagtgaacttcaatgacctaaaggagcatcttgtaacccaatgcaaagaaactaagaatcatgacaaaacaatacaggagcagacagccaaaatagccggtctagagaaaaacataactcacctgttagagctgagtgaacttcacaatgaaatcacaattattaacagcagaataggccaagaaaagaatctcagagcttgaagatgatctttctgaaataagacaggcagacaagaatagagataaaagaatgaaaaggaatgaacgataccatcaaaaaatatgggattacataaagagaacgaatctatgatggattggggtacctgaaaaagacaaggagaatggaaccaagttggaaaacatacttcagcacaggatccaagagaactaacttccccaggttagttctagcaagacaggccaacactcaaattcaagaaatccagagaactccagtgagatactccacgaggagatcatccctgagacacataatcatcagattctccaaactctaaatgaaagaaaaaatgttaagggcagtcagacagaaaggccaggtcacctacaaagggaaccccatcagatgaacagccgacctctcagtggaaaccctacaagtcagaagatactgggaaccaatattcaacattcttaaagaaaataatttccaacccagaatttcacatctggccaaaccaagcttcataagcaaaggataaataagatgcttttcagacaagcaaatgctgagggaacttgttactaccagacctgtcttgcaagagctcctgaaggaagcagtaaatatgaaaaggaaaaaccattaccaggcaccagaaaaacacactaaagtacaaagaacagtgacactgtgaagcaaccacataaacaagttagcaaaataactagctagcatcatgatgatgagatcaaatccacatataatactactaaccttaaatctcaatgtgttttccaatgaaagacacagaatggcaagctagataaagaaccaagacccatcagtatgctgtattcaagagacccatctcacacacaaagaaacacataggctaaaaataaagggatggaggaaaatttaccaagcaaacagaaagcagaaaaaaacagagcttgcaatcctagttcctaacaaaacagactttaaattaacaaagatcaaaaaagacaaagaagagcactacctgttggtaaagggttcaattcaaccagaagagctaactatcctaaatatatatgcaccctatacaagagcacccaggttcataaagcaagttattggagaccttcaaagagacttagactcccacacaataatagtgggagactttaacaccacaatgacaatattagacacatcatggagacagaaaattaacaaagatattcaggacctgaactcagctgtggatcaagtagacatgatagatatctacagaactctccaacaaaaaacaagcgaatatacattcttctcatagccacatgacacttaccctaaaactaatcataaattaggaagaaaaacactcctcagcaaatgaaaaataactgaaatcataacaaagagtctctcagaccacagcaaaatcaaattagaactcaagattaagaaattcacttaaaaccacacaactatatggaaattgaacaatctgctcctgaatgactttggggtaaataacaaaattatggcagagatcaagaagtgttttaaaactaattagaacaaagagacaacataacagaatctccaggactcagctaaagcagtgttaagaggaaaatttatagcactaaatgcccacatcaaaaagagagaaagatctcaagttaacaacctaatattacaactaaaaggactagagaaccaagaggaaacaaactcccaagctagcagaagacaagaaataaccaagatcagagctgaactgaaatagagacacaaaaaaaccttcaaaaaaatcaatgaatccaggaggtttttttaaatttactttttatttcaataggtttttaaggaacaggtggtgtttggttatataaataagttctttagtggtgatttttgagatttgggtgcatccctcacccgagcagtgtacactgtactcagtgtgtagtcttttatttctcactcccttcccactgtttcccctgagtccccaaagtccactgtatcattcttatgcctttacattctcatagcttagctcccacatatgagaacatatgatgtttggttttccattcttgagctacttcacttagaagaatggtctccaattccatccaggttgctgcaattagaagaatggtctccaattccatccagtttgctcctttttatggctgagtagtattccatggggtgtgtgtgtacatatcacattttctttatccactcattgattgatgggcatttgggctggttccatattttcacaattatgaattttgctgctataaacgtgtgtacaagtatcttttttgtataatgacttcttttcctctgggtagatactgaggaatggggttgttggatcaaatggtagatctacttttagttctttaagcaatctccacaccattttccatagtggttgtactagtttacattagcatcaacactataaaagtgttccctttccaccacatccatgccgacatctattattttttaatttttttaatattgccattcttacaggaatgaggttataccgcgttgtggttttgatttgcatttccctgatcattagggatgttgagcatttttccatatgcttgttggccatttgtatattttcttttgagaattgtctattcgtgtccttagcccacttttttatgggattggtttttttcttactgatttgagttctttgtagattctgaatattagtcctttgttggatgtgtaggttgtgaagattttctcccactctgtgtgttgtctgttaactctgctgattatttcttttgctgtgcaaaagctttttagtttagttaagtcccatctatttatcttttgtttttgttgcatttgttttgagcttcttggtcatgaagtctttgcctaagccaatgtctagaagggtttttccaatgttatcttctagaatttttaaggcttcaggtcttaagttcttgatccatcttgagttgatttttgtataaggtgagagataaggatccagtttcattctcctaaatgtggctagccaattaccccagcactatttgttgaatagggtgtcctttcctcactttgttgaagatcagctggctgtaagtatttggctttaattctgggttctctattctgttccattggtctatgtgcctatttttataccagtatcatgctgttttagtgactatggtgttacagaatagtttgaagttaggtaatgtgatgtcaccagatttgttctttttggttagtcttcctttggctatgtaggctcttttttggttccatatgaattttgggattatttttcatcattttgtaaagaatgatggtggtattttgatgggaattggattaaatttgtagattgcttttggcagtatggtcattttcacaatattgattctacccatccatgagcatgggatgtgctgccatttgtttgtgtcatctgtgatttctttcagtagtgttttgtagttttccacgcagagatctttcacctccttggttaggaatattcctaagtattttattattattatttgtagctattgtaaaaagggttgagttattgatttgattcttggcttggtcgctgaaggtgtatagcacagctacggatttgtgcacacttgtgtgtaactctgtatcctgaaactttgctgaatgcatttaccagttctagaagctttttggatgagtctttagggttttctaggtatacaatcatatcattgggaaacagcaataggcagacttcttctttaccactttggatgcccttgatttctttctcttgtctgattgctctggctagaacttccagtaccatgttgaatagaagtggagaaagcgggcaatcttgtcttcttccagttttcaggaggaatgctttcaacttttccctgttcagtataatgctggctgtgggtttgtcatagatggcttttattaccttaatgtatgtcccttctatgctgattttgctgagggtcttaataaaataaggatgctggattttctcaagtggtttttctgcatctattgagatgatcatgtgacttttgttttttaattctgtttatgtagtgtatcgcatttattgacctgcagatgttaaaccatccctgcatccctggtatgaaacccacttgatcatgatggattatctttttgatatgttgttagattcagctagctagtatttttttgaggattactgcatctctgttcatcagggatgttggtctgtagctttcttttctcattatgtccttccttgcttttggtattagggtgtctattagtctgtttcagtattagggtgtgtattagtccattttcacactgctgataaagacatacctgagactgggcaatttacaaaagaaagaggtttatttgacttacagttccacatatttggggaggcctcaaagtcatggtggagtcaaggaagagcaagtcacatcctacgtggatggcagcaggcaaaaagaaagagcttgtgtagagaaagtcctgtttttaaaaccatcagatcttgtgacactcactcactgtcatgagaacagcatggaaaagacccgccctcatgattcaatcatctcctactgggtccttctcacaacatgtgggaattatgggagctaaaagatgagatttgggtggggacacagagccaaaccatatcatggtgattttggtttcatcaaatgatttagggaagatttctctttctctatcctgtgaaatagtgttaataggatgggtaccaattctttgaatgtctgatagaattcaggtgtgaatccatctggtcctggacttttttgttgttggcaatttttaaattaccattttcaatcttgctgcttctgattggtctgttcagagtttctatatcttcctaatttaatccaggagggtagtatatttccaggaatttatcgatctcctgtaggttttctagtttatggatgtgaagatgttcatagtagtcttgaataatcttttgtatttctgtggtggtatcagcggtaatatctcccatttcatttctaatagagcttatttggatcttctctcttcttttcttgattaatcttgctaatgcttatcaattttatttatcttttcaaagaaccagctttttgtttcatttatctgttgtatttttttgtttcaatttcatttagttttgttctgattttgttatttcttttcttctgctgggtttggatttggactgttctagtttctccaattctgtgaggtgtgaccttagattgtttatttgtgctctttcagactttttgatataggcatttaatgctatgaattttcttcttacctccacttttgctgtatcccagagtttttgataggctgtgtcactattatcgttcagttcaaagaatttttaaatttccctcttgatatcattgttgacccaacaatcattcaggagtaggttatttaattaccatgtatttgcatgcttttgagtgttcctttcggaattaatttccaattttattccactgtggtctgagagagtacttgatataattctgattttcttaaatttactgagacttgttttgtgccctatcatatggtctattttggagaatgtcccgtgttctgatgtatacaatgtatattctatgcttgttgggtagaatgttctgtaagtatctgttaagtccatttgttctagggtatagtttaagtccattgtttctttgttgactttctgtcttggtgatctgcctagtgctgccagcggagtattaacatcccccactattattgtgttgccaactacctcatttcttatgtctagtagtaattgttttataaatttgggatctccagtattaggtgcatatatatttaggactgtgatattttcctgttgaactagtccttttatcattatataatgtccctctttgtctttttaaaactgctgttgtcttaaagtccgttttgtctgatataagaacagctactcctgctcgcttttgatgtgtccatttagacgaagtgtctttttccaaccctttgccttaagtttatgtgagtccgtatgtgttaggtgagtctcctgaagacagcagcaacttggttggtgaattcttacccattctgccattctatatcttttaagtggagcatttaggccatttacgttcaacattagcattgagatgtgaggtactattctattcgtagcgctatttgttgcctgagtacctgaaaacctggaagcgttcccttgaaaactgacacaagacaaagatgccctctctcaccactcctattcaacacagtattagaaattctcaccaaggcaatcaggcaagagaaagaaagaaaagctattcaaataggaagacaggaagtcaaactatctttgtttgcagatgatatgatcctatatctagaaaactccatcatctcagctcaaaaacctcttagctgataagcaacttcaacaaagtctcaggatacaaaatcaatgtgcaaaagtcactagcattcctatacaccaacaacaggcaagccgagagaaaaatcatgaattaactcccattcacaattgccacaagaagagtataatacctaggaatacagctaacaagaaaagtgaaggaccttttcaaggataactataaaccattattcaaagaaatcagagatgacacaaacaaatggaaaaacatatgctcacagacaggaaggatcaatatcgtgaaaatgaccacactgcccaaagcaatctgtaaattaaatgctaggcccattaaactactattgaccttctttacagacctagaaaaagctattttaaaattcatatggaaccaaaacagagcccaaatagccaagacaatcctaagcaagaagagcaaagctagaggcatcatgctacccagcttcaaaatatactacaagactacagtaaccaaaacagcatggtgctggtacaagaaccgacacatagaccaatggaacagaatagagaacccagaaataagaccacacacctacaaccatgtgatctttgacaaacctgacaaaaggaagcaatggggaaaagattccctatttaataaatggtgctgggagaactggctagccatatgcagcaaattgaaactggaccccttccttaacccatatacaaaagttaactcaagatggattaaagacttaaatctacaacccaaaactataaaaatcctgaaagaaaacctaggcaatgccattcaggacacaggcaagggcaaagatttcatgacgaagatgccaaaagcaattgcaacaaaagccaaaattgacaaatgggatctaattaaactaaagagcttctgcacagcattaagaacctatcaacagagtaaaccgacaacctacagaatgggagaaaatttttgcactctatccatctgacaaaggtctaatatccagcatctacaaggaacttaaacaaatttacaagaaaaaaaaaactcaaccccattagaaagtggtcaaaggacacaaacagacacttttcaaaagaaggcatacatgcagccaacaaacaaaaaaacctcaacatcactgatcatctgagaaatgcaaatcaaaaccacaacaagacaccatctcacaacagtcagaatggctataattcaaaaaactgaaaagatgctggcaagattatggagaaacaggaatgcttttacaccgttgataggagtgtaaattagttcaaccagtgtggaagacagtgtggtgattcctcaaagatctagaacctgaaataccatttaacccagcaatcccattacttggtgtatacccaaaggaatataactaattctagtataaagatacacacacacgtatgttcattgcagcactattcacaacagcaaagacaaagaatcaacctaaaagcccatcaatgataaactggataaagaaaatgtggtacatatacaccatggaatactatgcagccatgaaaaggaatgagacatgtcctttgcagggacatgggtggagctgcagaacattatcctcagcaaaccaacacagaaatagaaaatgaaatactgcatgctctcacttacaagtgggagctgaataatgacaacacatggacacatggcggggaacaacacacacaggggcatgtgggatggtggcgggtgagagaagggagagcatcgtgaagaacagctaatggatgctgggctactattaatacctaggtgatgggatgatctgtgcagcaaaccaccatggcacatatttacctatgtaacaaacctggacatcctgcacatcctgcacatgtacccctgaacttaaaagatgaaaataaaaaataataataattgcaggtcacctgatagaatgcagtgagaagatcatgggataacttctgtgatactcttgccaaaaaaaaaattatcatctaaatcttatcataaaaaaagttcagagaaatccaatggagggacattctgtattattggactttactcttcaaaagatttaaggtcataaaggtcaaagaaaaactgaggaactgttccagactgaaagagtcatgacaactaaatgaaattcatggacctgaatgggatccttctgctacaaagaacattatagacaattaagaaaacttgaaaagaaactgagaattaaatgatcaagtgtattgatgttaactttctgattatgaagtagttatataaaatgtcctgacttgtgggaatacccacataccagatgtgatggcataatgtcagcaatttactctcaaatggcccacaggggggaagctgtttttcctaaaatgtggaaattttctccaattttaagactgtttcccaaaagttaatctaataaagaaatgaaacaataaataaaaaagcaaaaagccttaggcaaaccttatttttccacaaggaaagatctaaataaatcagtgcttaaaattaaaattatctaagtttgattgcactataacaatcgtaatacatccaaacattgacaatgaccacagtaccagtataccaaaatgatgtctatctaaacttaaatctatcactatgtataaagataaaattataaaatacaaacaagccatcaattggctccactaaattactaatggcaacttgattatttggctgtttaaacagcaaacatttgggcagttcgagtatgtaaaactcagtaatactggttttcatttgcaaaatccacttaaaagttagctgaagaggccaagaaacattatttaaaatactacataaattttcatcagacatgtataatatagaatatttccctttagtaaaaatgttcacatcatatatttaatgggaaacaaaatatcatgtgaatagcccaaataaaattgccttatctttcagagtatgtattttcttcttaaaatctgtgcatactcttttgttacttccaaaactggatcttgattcagattttccttgtgtgtaaatcctagaggagaagctatataggatccaggttcatatttagtagcagctgaaaaaaaaaagcaagaattatattattattattattattattgttattgttattattttaagatagggtctcactctttcacctatgctggagtgccgtggtgtgatcacaggtcactgcagtctcgtcctcccaggcttaagcaattctcctgcctcagccccaagtacttggaactgcaggcatgagccactgtgcctggcaagcttttgtattttttataggggcagggtttcgtcatgttggcacaggctgctctcaaactcctgggctccagtgatctgcctgtctcaggctcccaaagtgctgggactacaaacgtgagccaacatgcctggccaaagaattatattctacatatttcatagttaactaagtgcaaatcagtaaaaaagagttgagagctttttcagtgttaacaagaatgaaacgtatgtatgactacaatgctaacttattattagataagaatctgcccatagttgcacactaaattaatgatcactgtggttgtgtatcacagcttctggttttctcattcttcattcatttattcaacaaccgcatgctaaggtactagactatgccctggagttacaagatgaagatgatacagtccacccctcagcaatcatatgctataacctgaaaaagcagacaaataggcaatttccataccaagtcatagataccctgacaggtataaaacagggcactattggaatgcaagagggatacctatcccagttttgtctcgatactgtaggcttttcggtggaggcatggttagtggatacctgaaggatgagaaaaaaaggttggcagatagagcaaagaagcaagtgcaaagagctggagaaggacgagcactgtggaattctgtgcagtccagtttggctggatcctagagcaaaggggcagagtaaagtaagtggtgagagataagcctgagtaacttgacaagaaccaaatgaacgtgggtgtttatattacatgttaaggaatttggaactttttctgagggcaaaagtaaaccaatgacactgtaaatgactggagatttaaagtgttacctctcaagcgactgcttataaactgtaactgcttgaataggttactagatgagactgggatgttttggccttaaaaatcactaccataaccctgagaaattgatgatgcctctgttttctgagaaccgtttctgtgtgctggctgacaattccatagggatggcagaagtgaagagtagagccagacttcttgagctatttttttcaagctatggaacgtgatgaattcatgaggcataagtatgctcttcattatacatgttcaagttttcacatctttcattagatgtatatgaaagaatatttaatgtagtatctactagcccaagaacggaaagggatgtcgtttgcagtttatttcagatatatattacttaatcaatttaattcataaattttggtaacatacctgctacttctgcagttagatcattttgcaacttctgctgcatctgaaataagtcaaatattatttataacgtttaagaagagacattatcatggtaaggagcattaattacaaaatgcggcctttaaataatacttttacagactagacctaatttgaagattgcttaaattaaaaatatcatataaattcctaccaattttaagtttagataatggagaacatatatgtgttatgctgtttagattaatctcacaaaagtacaattaatattggtctgttggatctatgtcatttcaaaagtgtgatgttttcccttattagtacagaggttacacaattcaagtcatattctgcaatgaatgcattactttcccattcttatcaaaactctgccctttatcaaggtctaaccagtttttcactttaatgaatagttccttacaatgaactctccattctccacttttagaaaataataatttcaaagtatgttctttgctattaattcagcacagaatctttaatacatacttgaagaaagcagtattgttgtgatgccatgtgaaagttccactggcaaaagattaaaaatattacgctattatgattaacatttcttcattcatacggacacaaagatttcagaaaatttacataaaaacaaggataaatacaggttagagccagttttcaatcttagtttctgtgattcatgaatgtctagaattaaaaactaggaaaacaatttagagttatttaactgcaactttgatttcttttcagaaattagtacccattttttaagcatctgacaagttatagttagctacttaattatgaaaggtgtgggaatatttcaaacttattgccagtgtccctatctagagtgctctgatttaatttttttttagaataggtattctctcactaaatgcctagaacagggtctgagatagtttgtggtgataaagataatgatatctaatgcctttacaaattttaggtgtcaagtcaatttttttgttttactaacaggtttaccaatattttgagactcctttccataacatttctgtgacaaaaacattatagataggctttatagagtaggtaacatgacaacagcattaccatccaggccttataaaagtaataattcaagaaatgatccttttcaagctatgtcccacagaaatctaaggttccacagaggatgctgaaggattaagggataagaaagtcacagcttcagagcactgatccttcctttagtcaggcagcactacttctgttttctataatgtggttttatgcaatttaaaaaagttccattcttaaaaaaaaaaagagatttacttaaacgtatgaatgtcactgatttagtcaaagtccttaattttacataagaaacaaaacaggctcagagagactgcagcttgcctgaggtcacaaaaccaattagttacaaggtaggagtgggcttcagatctttcactgagcctggagttattctatgccagcaccttccttcatattcagaaaagaaatacaggtttttaaaaataggctgggcgcggtggctcacacctgtaatcccagcactttgggaggccgaggcgggaggatcacaaggtcagaagatcaagaccatcctggctaacacaatgaaaccccgtctctactaaaaatacacaaaattagccgggcatggtggcgggcgcctgtagtcccagctactcaggaggctgaggcaggagaatggcgtgaacccaggaggcggagcttgcagtgagccgagatcgtgccactgcactccagcctgggtgacagagtgagactccacatcaaaaaaaataataataataaaaataaaaaaataactcagacagtccaggtgtggtggctcacgcctgtaatctcagcactttgggaggccgaattgggtggatcacaaggttaggagttcaagaccagcctggacaatatggtgaaaccccgtctctactaaaaatatacaaattagccaggcgtggtggtgtgcacctgtagtcccacctactcaggaggctgaggcaggagaatcgcttgaacccggcaggcagaggttgcagtgagcagagatcacgccactgcactccagcctgggagacagagtgagactctgtctcaaaaacaacaacaacaaaaaaaagagaaaatgcatctataaactgtcatgatgctctataatgtttaagcatgagacaaaaaatagtagctctccaaatttgtaagttatgaatcaaatttaaagaacaattaatatcataacttctggctagtaccagtcaagacactcaatttataaagaacccatttttcaaaccgcagaacagaaaacttgaaggagaaaatctttagttgaaccaagcaagcagaaattaagaaaactgttccttaaaagaactattcattctcctccaaataagacgtggtttaggaaaatcaatcaagtcaattacccatgttgtgagttatttatagaaaaactgaaaacacaaaacagatttctctttaccgtctagcatacgtctgtccaacttctcatcattaatttgtacatacaaagacatgggattaatttcaattatcacttaaatccagccataaatgataggagaaccttcattttcctggcctcaggtttcaaatgaggacttagactctctctacctatagcttcctcttgagaggatatcagatctacctaatgggtgaatttgggcaaagcacacagtgtgcttgcttggctcagggtctctttcaaaagatgtgtctgcccacagtgacatgagttcaggtctgctgtcatctctgcagtaagcagcacgcacctgcgatgggtgtcaagcatttgttttctccacttaaaactctgtgggttagtgcctaatctggcataaaatactgtggctgcacatctgagcctcatcctcccattagttatcatgagtctgcaatagagctagtgtgttgatgtccatctatctgactcctgtgttctgaactcagaagggaaggaggagcaccatttgctgcctatccaccacagcctgaacaagaaagatgactgtataacacttatagaaatagtttcttcttccttgacttttctaatcttaccatacattcttcacaactacctccactttaaagaggggaggagttagaaaatttttttaaagaaatatagtgaaatcagtaccaaaggcaaagtccaataaatacaaagttcactcttcagcaataatttattgacaggctactgctaaattatacttgagattacaggctggaaaataaggagccaataaaactataaaaagtacttctgatatataggacaaaggatcccagggttaatctagaatgtgaaacctgtaagtaaaaatcagtaaaacataggcatagcaatctattatcactacaatggtgttaagtggcaaggctatgtggcaggccaggtctcactaacgcaggcctccataacaactgctttggcactgactgagtagttaagttaaacattaaaagctgaaagagccagtgcccttatacaggctggaatgtaacaaaagcccaccaagaatcttgcctaggccttccctgggccttaaagtatgacaaaataatgaaggaattcttaataggacctgtttggtattaaacaagttttactggggatctcaagaaactccccaggcctccacaaataagtttattgggggtctaatggaactcccaaacctccatgatttagcaggagacaagataagggtaatcgctccagcacctggacccatttagattaaataaatttactgaagctccagaggaaggtctgcaggacttagatcttagttatagattaaaagaagttaatcacttatgtctatagacgaatgcacacttacatgtagatatatagcttagaaggtatataagctctggaaaactttgtaattttgaattggtgtggtaataatttccaggccttccttgtaaccctgtaaccggttgcagaaaataaaacctctcttcccaattcatctgcatctcattactggaccatgataaatagcagcccgactctcagtttggtctgggaacagtcagactctagacttcatataatggggtgagagatgcaataaatactaactgtcatgaatgtagagaaaacttgtttcaacaaccagttataatatattatttctctggtgtgtgatttcatacaaaattataaccatttttcttgaggttagagacaatgctgagtacgatagcacttcacagtaggaatagtccaaagtgttaaaatcttgcaaataaaggagatgtataaacagatccaatattagtgctatttttaacattttgcttttgaaaatcgtagctaaaaatttccaaatatcctgttttgtaatgccccacccagaaacccgccccacccagaaacccaccccaccccctaccttttttgtaaatctcagtttagatggtatgttacctcctcctccttgtattagctgatgttttcctataggaaatacttaagttcctagcaactctagaaggcaccttctttctgtaactctaaaaattctgtagacaacagctgtataagaactcttccaaggtgtgattatggagacatgcctttgtatctttttttttgagatggagtcttgctctgtcacctgggctgcagtgcagtggcacaatcttggctcactgcaacctctgcctcctgggttcaagcgattctcctgcctcagcctcccgagtagctaggattataggcgcccgccaccacgccaggctaatttttgtatttttagcagagacagggtttcaccatgttgtccaggctggtctcgaattcctgacctcaagtgacccactcgcctcggcctcccaaagtgctgggattacaggtgtgagcctctgcacctagcactcatatcttgatataatcatgcttttaaatctcttttagtaaatctaacatgattgggcaaaaaatgccccacaaggaaactaggtatgccttggaactactacattaacattaactttaaaacaaacaaattttctacttatctagaaatactaaaaaatgaacacccccttccccacaaaacagaaatttaaaaaaaagttcctcaaaaatcttcccttgcatcacatctgcttttatttattttatttatttttttcccccacccatgagatggagtcttgctctgtcgcccaggttggagtgcagcagcgcaatctcagctcactgcaacctttgcctcccaggttcaaacgattctcctgcctcagcctcccaagtaactgggactgcaggcgcacaccaccatgcccagctaatttttctatttttattagggacggggtttcaccatgttggaggttggtctcaaactcctgacctcaggtgatccacccaccttggcctcccaaagtgctgggattataggtttgagctacagtgcccggcctacatctgctttttatactctctcagcaccatcttgtaaaatgatacattaccttgtttttctggtaagtactgtgaaaggaaaatatcttgggcctccaaaatcactaagctaaaaggaaaactcaggctggaaactgcttagggcaaacctgcctcccattctattcaaagttacctctctgctcactaagataaatgcagatctgactgtctcctttggaaaggctaatcagaaactcaaaagagtgcaactgtttgtctctcacctatctgtgacctggaagccccctccccgccaccagtcttcctccctttgcttcaaattgtcccgcctttccagagtgaaccaatgtacttcttaaatatattgattgatgtctcatgtctccctaaaatgtataaaaccaagctgtgccccaaccaccttggacacatgtcatcaggacttcctgaggctgtgtcacggatgtgtgtcctcaacctcggcaaaataaactttctaaattaattgagacttgtctcaaatttggggggttcatagtactaatgagaacattatatttgcatcttgcttaaccattgacagacgtatttaacattcatttcccattagtacccagtggtacaatttcgtgactgaggcatttggatgctgatcatctcatttttttcagaaaaataaaacctaagcgaacaatatgattaaaaatatcagctagctgggctcttgtaatctatgtattaaaacaatcatttaatgcattctcttttaagctatttagccacaatgctatctaagaaaccttagatttgctcttctatgatttgttaggacacgaaatagccaggtaaacacaacaaggttgaggttcattccatgtgggcctgtgctacttttctgtgcgctaaggagatcataaaaacatcaaaactataagccaatgtgcatcgatggaaaattttaaaaacaacaatatacacaaagaaaactatttattgttgttcaaacaaatgttttacggattttgtaatttttttaagagacagaatcttgctatgttgcccagattggaatgctgcagtgccgtagctactcacaggaataatcattgcgcactgcagatttgaactcctgggttcaagtgatcttcctgcctcagcctcaggagcagctgggactacaggtgtgtgccactgtgcccagtttttgtaattttccctcagttgaaaaatggacaaatgttagacaaataccttaatctgggtcaagcatagttgaactacgttttgttttttttttccttaccaactctatagttgatacagctcgtcatttttggatccattttgaaatccccagaaatagactcttactctgagtgaaaccacacggttgaactaaaaggttcctgttacatgtccaggggagatgtccatgtgcagctttacatggaatttggggtattaagaatagaactgattctgtttggtcacatttgctattgaaggactctagataccattgccatcttagtcatcaattactaaagttatggccaggtagagagacaaaacttatgtgagctttactttaaaaattcaaatatttatttgatttaactatttcaaaaccactgtgctattgcatagcaatagacacattttactaaaattgggattaaaacactattaagtgcaatagcaattacagatgtactcatgtaagaaaatcacaaaactttgaacttaaagaacagattaatcaagtgttgcaggtttatataacatacaaaagtattcaccttgggtccttttaaataataaacatccatgggtggttagtgtttggacaccaatcattcacatatgatgacgggtagaaaacctgagatgatgcagaaaaactttaaaagtgaccccaggcacactaaaccattaaaagtgaaccccagacaaactaaaatcaattagtaagacaaagcacatcaaagtaaacctttggttaaaatctaacttaaatgcagtttttaaaaaaatttaaaatgtgtcagtttggttacatttattaaataaagttaacaaaggagtaatctcttatgaatgagagctccagagacttaaaaataactgtaaaatttctgtctcctctctttattaacacaggtaattattacttttacttaccatacacaagacaattaagtaactgagtattttaccaaataacacacaagaattctatcagaaatctgaacgccgaaggaaaaaagatagctaaccttcaacaagtagctctccatgtccttaagagcagacctcttttttcttggaatatgttttctgttgagaccttcactatcattaagatttccaacgcaaggtgacttaggactggccttgtagcataagcagtgaatagagatctggatctggtctgctctttctccacagtaagttgcgtactgacctctgctatcatctcattagttctacgaagattgaaaaagacaaatgcttagtatttcattttttcctaaatgattcctaaatgacttcgattgttctaaaagttgccattaagagtaaatggaatataccataggccgtgttttaactctgaaaatgtgttagagcatgcctactgtatccaattatagttttaacattgttctaaagaagtacatctatttctagagggatttctaacaaacaagtagttcaaagagagggaggggacagaaaagactatcaatgatgtatggcttcatagttaacacttgttgcccatctggaatgactctacttatacgattcttaaggatgccattagaattacttgtattccaagggtaactatgtgaaatgatgaagatattaatttgcttgacaaaataaccatttcactgcgtataaatatatcaaaacatcaagttgtactccttaaatatatacaagaaaaaaactaaaagtaaaaataaaagctagaaatacttgtatttagtaaacaatacatgttgttagagattgtctaaaaaactctctctcaaagacattttcaaacaattgttttcaccacccttgtatatttcacccattatctggaaaaaattgagcatttggcactgaggaatcattcacggcgacttttccttggggagaataagactgctgaaatcaaagagaactaaagcagcatcgaggacaatcagctcctaacactgtggcccatgtatcagaggtggggcctgccctttctgtcttccatataccccctcaggctgaccaaggtgttattttttatcacttagtaagttatacttcccttcaaccctagttgatcattctctgcttcacaagtgtgcctttatgtggattggaaaaactatacaggacacttcttctcaaggcaccctctaatgatcacaatcaagcaaagtgaatttactgagtgccagaatgtgtccagagtagtcgtacttgaccctttcggttttcagctgtcgtcttccagaaattaattaaattcattaatattttgaattaagggaatactgacaagcaatttttataatggtatcactgtctaaattatgaagcttcataaatatttagctgaaaccctaatagatcaggttaactatataagaatattaaggggtggggggaagccacataaaaccaaaaaacaggagagacaggaactgtcctggactaaagattttaaaggttacgttcatttactattttcaattttacttaaaggttaagttcatttactatttataatttacaattttccaaaattgtatgatctagttagctttcacttcccacaaatctcatgaacctgtctcactaaaagtcatgcttttgaaggcaaattaatgagcttaacttattttctatgattctgcatattgacttacctactgagttcatttgacaaggattctctaacttttacttcttctaggtagagttccttatatctttccaattcggttttattaaagtcggcttgcgaagtttttattctggagatttcagattccagatctttgattgtgagttccatctgagtttttattgaagtagtattatcctcccttaactgtgctaactgttcatgagatactgctgcttgtttctaaaataaattaaaagggaacattttaaaagtaattataacctgaataattactgtgtatttgtttccttttgtttggagtcagtgactcagagaacaattttaagtatgtgattcagagaacaattttaagaaaaatgtgaagaaagaaagaagctcaagcttaacatatttatcaccagtaccaactgaattaataactgaatctgaattgttgaacaattctccaaagaatgacagaaccaagttaaaattttaaaagtggaacaacgtaacttaaaagcagttcaagagtatggtataatttctaaatcacaatttttttttttttttactttttctattagtcttgttttatgccaactggctttagtaattaaatgattctctagtgagaattattcttatggaagatcaatttagttataagaatgatggaaacgaaaatatttaaatggagaaacaaataccaccttccttctagaagtctaccaaacaaattgctgtaaggaaagtagagaaaacatgtacaatgtatatatccaaaataaaatttgcagtgaaatgaatgaaagcacattacagataaatgaaccaacctgcaaggtgagaacggcttcgtttaatttttcttgtatctccttccttgctctttcttcaatcaacagtttatgccgttcaccttcaccacgttctaacatatttctttccatataacttttgaggtttactacttcttgtttcagctgcttcttattcttctgtagtgtttcacattgcttttgtattgctttcatagagaataatgtctgttgaagttgaagaacttcattctctgcatccagatgtagacatcgtgaaggtacagtttcctgtgcttctgtaaggtcaatctgcatgagtaaaacaatatagtttggtaatgaagaaggtagactgagaatggtctaacaaaaaactaatattttttttttttttttttttttgagatggagtctcgctctgtcgcccaggctggagtacagtgacgggatctcggctcactacaagctctgcctcccgggttcaggccattctcctgcgtagctggagtagctgggactacaggcgcccaccaccacccctggctaaatttttttatttatttattttttatttttagtagatggggtttcaccgtgttagccaggatggtctcgatctcctgacctcatgatccactcgcctcggcctcccaaagtgctgagattacagacgtgagccaccgcgcccagccaaaactaataatttttgaaataaattcagttgcaataaaatgttacctatactgttgtagattcataaaatacagacccttggattactcagaaaattaaaaacaaagttaaaaccaccagaattcacaaaaatacatcctttactttcatcatctttgccacacaacatttggacttgatcttagacttctgttttcctatgattgtttcatggctttcctccttaaaatggctctaagttacccctttagcacaaagtctcttattcctttaacccactatcattctccataatttgcagagaagttttaggggcatcatattgaattatttgggcctgagtcaataaatggctcccataataagactctgaaaataagactctaattaatacattttgaaaaaaaaaaaaggattccaataccataagccttttgctgaactgcaaatgtcttacgctaatttgagttacatttcaaagagtaatgatacttggagttaagaagcaatcacatctcccagtataaaagttcagtggcatgatccataccatttttctgaagaaaaatgccttaattcagtagcacaatcttgtaattcattgttactttacacaaaataagggagcacattaaagaatgacaacaaaaaattgcactgaaatttcagtggtgctgagttggaaataactgctttcctttagaggacataattatgattgttttttattttataaaggtaagtgaagtggtggttttaaaacatctacaaattgcttgccacttctcccatgacattccctctcctgaatacaagctggcattgacaaccggtttctccggaacacaatgtggcagaactgctgtgtgacttctaaagttggttacaaaaagtcacacagcttctacctgactctctctctagggacgcttgtccttaaaatgcagccaacatgctgtggggaagcccaaaccacaccgtgaaccctcatgtaggtaggtgttcgagctgacttccctacctaacgtcccagccaaaagccagcttcgaatgccgcacaggtaaataaacaagcctttagatgattctagtccccagctttaagtcacctcagctgatgccaagtaaagagaaagtgagttggccccactgagccttgcctaaaactgcagattgtgaacaaaatagatgttgttttgagacactgcatttttttatataccaagaaataactgatacagatattgacactacatatagattgcacaacaacaacacaacaaaaactactaaaacatgtaggactaccattggaccaggagctaatcagaagctaaaaggacctacagaagaataagcacaaaaacaagaagagttttaaagagactgttagtggaagcctgatggtcctcgaagaagctggtaggaagggcttcaaggatagtgaagaaaacgatacgggaacctgaaggaaagggcactgttactacacagccgctgaaagtaaaaccaatgcaagagataagctaaagaaagactactacatataaaagaaccaggactttctaggttcagtatcctttttatagcctctccacatgtcagattcccaaatatagacagtccttgacttagcatggttcgactcaccattttctgactttttataatactgtgaaaatgatatgtgttgagtaatgaaatgatatgtgtaagccttttggcttacaggggtggttacatcaggataaagtcactgtaaatggaaattatcgtaaatggaaaacccacccataacttctgatatttgcaatttatgatggcctataaattgcaaatatcagacataacaaatgcaaatgccatccagacataaacccatcctaatctgaggagcatctgtattgctgagataaatggcctctgagataagatcaaatccagggtgctgccaggagaaagtctgaaggtgaagccaagactgtcagtgtaaggctctattttaagaccttagaaagatttaaggcggtgcctcaaattcccttaaagatcttaagggtatacgcatcttaaggcactgtcctactacacagaacagtgtgcttccttcacaggaagcacaaggtgaagtgcttatctcaaagagattgggacaagtggtttttccaatgacaagaactcaagtaaaattcacaagagactctaagagaattatagtaacaatagcactgcttgctagcttggcttaaaagacaacaagacagtaaaaatgaaaagaggccttaggacctaagagcttctacagggaggaagctggctgaagaaactacttagctgaaaacacaggtcattgcttatgaaaaggatacaacaaagagccaagaaggtaccacaaaaagccacagagtatggttcccatgaagtccaaatcaagtaagtggaagcacacatcaggctgtatttcagaatttctatggtctaatattccctttgtgactcccattttctctctgttcaataggagggtctctggcagtttaggagaacgctgggtgggtgagtggtagacaagttgtccctttagttcttacgtctttgtgttgacaagaaatgcactcaaggggttataccgcagaaaccacaacccagggtgcatccctaccggctgtgataaagatggtaggatcttgcacttcaagcctgagcttgctgccatattaaatgaaacttgtgtgtgtgtggtgggaggttaggatcttgcactttaagcctgagtctgctgccatattaaataaaacctgtgtgtggggtgagaggtaataattagaaattagtgtgtttttcaagttgtagaaatcttttaaattatagttatagggtcaattgtgcaggttttaaaacatgtctatacattccttaatatgcacagcatagacagagacatcatcgagatggctgactgggaatacccagcactcacctctttcaaaaagaaaaaccaaaacagcaagcaggtaaccacaccttgaggaaaacatcaaagagagtatactggaattcagcaggaaattgatagggatcctctgatgacagaaggaaagggaactgaggtagccagcccagccaggatcatctcaaaaccaggaccgattcccccaaatccctagccccacagaaccatatacctgtggaaataggtggtcacctaatagcccaccagggaaactactctaggtcaaagggatcctaagtgtgtgctgtctagagcctaggagccacctgactgacaccactgccaccaccagcagccctacccccttcaggggcagtgctgtgcatacctgtacatacctttaggaggccggaggactggcccactcaagtgtaccatgcaggagcctgagaacaagcctgtcaaacccaccagggttggcgcccatgtgagccatatgagagcctgaagacaaggccactttgcttgctgctgctattgttgctatcagtgctcacatacactgtccaggaccctgaggagcagcccaccccacccaggcctctgtgcctttacccaggccccgtctaccactaataccaaggagagtcctactgccccaccggcacctgcacatggcatccaggagcataaagacagggctgcctcaccagccactggcaaaggctcctgcacgtgtcttcagttaacctgtggacaagcctgctccacacactgccttaggtacccacctaaatgttcctcacagggggccagagaaatgcccatgcagcctgctttcaccactatcagtgcccatgcatgctaccaagggatccaaggtccggcccccagctgctactgtcatctccagtgccacaagtgtcaccaaggtcctttggcctggcctgctattgccacctctgatcccagcacacaccacctggaggcccaagggccagcccactcaggtaacccactgccaccaaaaactgggaagcatggcctggtgctgccaatcacacatacatccttgtgtatgccatcaatgtgcctgaggactggcctgctgtcctccccatcaacatcaaggcctcaccacagcatcccctgctactaacaaccacaccgtaagccactgaggaacttacagacgctgatgttgattacagcagaagaaagcataagtatatggagaccacaccaatgcacccacccatcatcaatgccagagcaccatattcaaccaacaacatagatacatctacagaaaaaagtcaacccctaaaactagatgaagtgactgttacaccagctgcacaggtatcaacattaaggacacaagaagtacgaaaaatcaaagaaacatgacacctccaaaggaacagagtaattctccagtaacagatcccaaagaaaacaaaacctataaaattcaaaataatgatcttaaggaaacatagtgagatacacaataatacaaaggaatcaggaaagattcctgataggaaagataggtaatacaaatgaatcaggaaaacaatttatgatctaaataagaaattcaacaatgaaaaagatagcattaaaaggaaccaagcagaaatcctggaactgagaattcaatacataaaataaaaacaactgagaatgttggcaatagactagatcaaggagaagaatgaatttctgaacttgaagagaggtctttatatgaggccaggcaaacaaaaagcaaaaagaaaaaaaaagaaaataaaaagaatgaagacagtgtatgtgatatatgggccatcatgagccaaaattttttcggatattgggagttgcagaaatagaagagatgggaaaaggcacagaaaacctatctaatgaaataatagctgaaaaactaccaagtcttgtgagagatgtaaacatctggatacagatgtctcaaagatccccaaagaaatacaataaaaaatgtcttctctgcggcacatcagagtcaaatgtcaaaagtcaaagacaaagagcaagagaaaaacaccaagtcacatacaagggaatccatatcaaatagcatatttgtcagcagaaaccttagaggataggagagaatgacatgatatatttaatatgcgggaagaaaaagactgcctgtcaagaatattatacctagcaaagctatcctttaaaactgaaaaagaggggccaggtgcagtggttcatccctgtaatcctagcactttgggaggccaaggtggggggattgcttgagctcaggagttcaagaccagcctggccaatttggcaaaaccctgtctctacgaaaaatatacaaaattagccaggcatggtggctcatgcctgtggtcccagctactcaggaggctgaggcacaagaattgcttgaacctgggaggcagaggtggcagtaagctgagatcatgccactgaactccagccagggcaacagagtgagactctgtctccaataaataaataaataaaactgaaaaagaaataacgtctcagacaagcaaaacctgaaggaatgcatcaccactagactgatcctacaagaaatgcttacaggagtcctcaatctggaagcaaaaagacaatgtctaccaccatgaaaatcaaaaaactgtaagactcactggtagagcagttacagaactgaaaaagagaaaggaatcaaacattatcactacagaaaatcagcaaattgtagaggtaaacaataaaagaggaagataggaacaaatgatagacaaaacaatcactaaacaattaataaatgaaaggagtaagtcctcacctatcataaaaactttgaatatatgtgatttaaattccccaattaaagatatagatagaatgaatggattacaaaaaaagaccaaataatacgctgcctacaagaaactcattttacctgtaaagacacatagactgcaagtgaaaggatggaaggatattccatgcaaatggaaaccaaaagcacacaggagtagctatatttatatgagacaaaatagatcttaagtaaaaaaaaaaaaaaaaaacataaaagagaaagagaagggcattatataataataacaggatcaattcagcaagaggatacagcagtcataaaggtatatatactcaatacctgagcacacagatatataaggcaaacatcactgaaactaaagagacagatagcctccagtacaataatagatggggactccatagtctgactttcagcattgaagggattatctaaacagaaaatcaacaaagaaacatcgaaatgaacctgcactatagaccacatggacctagcagacacttacagaacactgtattaagaagctgcagaatacacatccttctcattagcacatagaacattctccagaatagaccatatattgagtttaaaagctcatatcaaatatcttctcaaaccacaatggaataaaaatggaaatcagtaacgacaaaaactttgtaaactgtacaaatgcatggaaattaaacagcatgctcctgaatgaacaactgggccaatcaataaattaagaaaaaaaatttaaaatatcttgaaacaaatgaaaatggggaaaaaaatcaatccctatagaaagtgacagaagaagcactaagagggcaatttatagcaattaacagctacatccaaaaaagagaaagacttcaaataaacaacctaacaatacacttgaagaaaccaaaaaagcaagaacagacccaaaactcaaatgtagtagaaggaaagaaatgataaaggcagggcagaactgaatgaggtagactaataaagcaaaactgaaaactatattaaacatgaaaaaagagaaaactcaagtaaataaagagggaaacataaaaggagatagcaaagaaatacatggagtcatgagagactattatgaacaactatatgccaacaaactggaaacgtatggaaaatggatacattcctggaagtgcataaccagcaagaatgaaccaagaagaaaaggaaacctggacagaccaataacggtaatgtaattgaatcagtaataaagtttaccaacaaagaaaggtctaaaactgggtaagttactctgaattctactaaacttttaaggaaaaactaacaccaattttttataaattattccaaaatcttcctagtttattctaaaggtcagtattactctaaggccaaacccagacaaagacacaacaacaaaagaaaactacatgccagtatccctgaaggatgcagatacaaaaattgtcagagaaataaaggggatccagattggaaaacagaaagtcaaattgtctccctgtgcacatgacctgatctcatatacagaaaaccataaacacgccaccaaaaaagcctgttagaactaaagaattcagcaaaggtgcaggccacaaaatcagcatacaaaaataatgccaatagcatgtgtaacatttctatacactaataatcaactagcataaaaagacatcaagaaggccgtcccactattctagctacaaaataataaaatggctcagaataaagttaaccagagagattttgtaaagagctttataaaaaaaaaaaaaaaactacaaaacaccgacaaaagaaattgtagaggacacaaacatggaaagatattgcatgctcacggactggaagaatattggttaaatgaccttattactgaaagcagtctacagattgaacgcaagctctattaaataccaattttgatgtttttaggggaagacaagatggtcaccacatgcagccaggagatgcctctctgcgagagagaaaccaaaatatcaagtaaattatcacacttggagtaggtctttggagagaaaacactgaaatttgataggtaatgcaggcatcaaggctgaagaggaataaatctgggaagcctgcacagagtcaccaagcactaggattacctcccaatccagaaactaaggaaggggtgggtgaaggaactgtgcagcaccacactcccaccaacgaactctgggatactagctcccggagatccctggacccacacagacatctgaactggcaagaggaaccggctggcgaataggcagaggcacagctcaaacccgcatacagcccagaaggtttcgcacctggtacggctgcagcaaaacatgaccataggcacccatcccccaaggctctccatcttgctctgagtgactctagctcctgcttactgccaggccagaagacagtagggctgcatttaccatgggactgcagcatatctggtctgtgtaccttcttgtccaccagcccctcccaaggcccctgcctagctactcacgcaagggtaagcacacagcacagcctccactgccccatctgagtgctttgccggaggcctgggagcagttcagcccccaccctcagcacagccaaagctcaaccccatgagaccagaagacaaagtcatgaacctggtctcaataccccccggattcaagcacactgctcaagtatactgagctggtgtctgtggcctgagctcaagaagaggagtagctttctctctcacaatgccgagaagagagggcccaagttcatatgccagtgtgggagccaggtgtgctccctctgcaacagcagtccccaacctttttggcaccaggtgctggcattgtggaaaacaatttttccacagacggtggggtggggatagttttgcgatggaactgttccacctcagatcgtcaggcattagattctcataaggagcacgcaacctagatccctcacgtgcacagttcacaatagggctcgcgctcctatgagaatctaatgccgctgctgatgtgacaagaggagaagctcacgtggtaatgctcactcaccagccctcccctcacctcctgctgtgcggcccagttcctaacaggccacagaccagtactggtctgccacctggaggttggggaccctgttctacaagatctgtccaggaagggtgtatgtaacctgtctgtccacagcctctgcctgagggagcaccactgcctgaaacagctaacagtccagttgatctgggcacggaaggctgggggacaaaactacctagttgggcctgccctgggggcagacactggagggaggcctggttgggtgagtgccagctaagtgctccccacagccatctgctaggcaaaaaactctgggctgcaggcaccacaccaggtgcacacccacagaaccacagccctgcccggggatcctccccccttgacccacattatatcaacagacaacccgcagatccgcagacatactctacaacctgctctgactctaccaagcccagacaaccagcacgtccccagagagttgtaggtctctcggcaacctaacttttggcttgggccgctgccctaagggtgggaggtgtgcagccctcaaaattcaggtgtggcaccagtgattggagggggctctcccaagttccaggaactgatttggtgagggggttatctctcaccttcccaatcctacttctcccccttccccagagcactgccgccaacacgctgaaatagaagaggcatgccagcccgtactctagagcaccatctcctggattgcagactgaattacatcaccaaacaaaaattatataccttcaacacacatctgtgaaacccaatgcaggaaagtagccacaaggaaggaacctgtgtagagtcctggccatctgaaaccacccagaaacaaaggccaatcaactatacacaatacacaccacaaatcctcaagagaaaaaaaagaacataaaaacaaaaatccccatccaaatgacaggaatttcaaaacgataaagaaacatcagcattttcagaggaggaataatcagcacaagaactctagcaactcaacaaatcagagcatttcattacctccaaaaaatcacactagctccccagctataaattctcaccagattaaagtgtaatgacatgctttatcacagacatgtgattcagaatctcaatggcaacaaagctcaatgagattaaaaagaaagttgaaatccactccaaggaagccagtataaccatccaaaagttgaaacacgacagagccatttttaaaaagaatcaaactgaacctctggagctgcaaaattcaacacaggagggaccttcaaaaccagatgagaccaagcggagggaaggattacagagctcaaagaccagtcttttgagtcagcccagtcagacaaaaataaagaaaaaaccattttaaaaatgaacaaaacatctgaggaatgtgggattttgtaaagacactaatctatgactcattggcatggctgaaagagaaggagagagaggaagcaacatggaaaacatgtctgaggatatagtccatgaaatttccccaatctcattacagaggttgatggaaaaattcaagaaattcagagaacctctacaaccatccccaagatacacagcccatcagactttccaaggtcaacacgaaaggaaaaatctcacaggcagctataacagctgcatcaggtgaaaagctgacctctttccggcaaaaaccttataagccagaaagtggggcctgttgtcagcatccttaaagaaatttcagccaagaacttcataccactccaatctaagcctcatcagtgacagagaaatacaatcttttccagacaaacactaaagaaattcgttaccgctagaccagacttacaagagattcttaaggagttctaaatatggaaaagaaagaacaatacccactaccacaaaaacacacctaagtacatagcccacagaccctattacacaactacacaatcgagagtacaaagcaaacagctaaaaacatcatggcggaatcaaaatctcacatataaatattaatactgaattcaatggtctaaatgcctcacttaaaaggcacagagtggcaagttgaattaaaataaaacaaaccaataagaatcaacagtctgctatattcaaaagacatatctcacatgtaatggcacccacaggctctgagtaaagagatggacaaagatctgtcatgcaaataaaatgcaaaaagcaaggggttgttattcttagataaaacagactttaaaccaacaacagccaaaaaaggatgaagaagggcattacacaatgataaaggactcacttcgccaagaagacatccctaacctaaatatatacccacccaacactggagcacccacattcaaaaacaaccaagtacttccagacctaccaaaagactcagtcacacaataacagtggggatcttcaacatctcattgatagtgttaaggcaaatcattgagacaaaaaactaacaaagaaattctgggcttaaatttaacacttgactaattggacctaacagacatctacagaatactccaccaaacaactacagaatacacctttttctcatctgcacaaagaacatactccaagatcaacaacatgtttgcccataaagcaagtcatgatacatttttaaaaaatgaaatcacacaacaccattctcttggaccacagtgcaataaaaatagaaatgaataccaagaagatctctgaaaaccacacaattacatggaaatcaaacaactggctcctaaatgactttgggaaaagaaagaatttaaggcagaaatcaaacaatgatttgtaataagcaaaaagaaacatcataccaaaacttctgggatacagcaaaagcagcataagaggaaagcttatagtgcaaaacaaatatgttgaaaagttagacagatctgtaattaacaatctgacactgtgccgagaggaactaaaaaacaaggacaaaataaccccaaagctggcaacagaaaagaaataactaaaattagagcataactgagaaaacttgaggcccaaaaatccatacaaaggatcagtgaaaccaaaagttggctttttgaagggataaaaatactgataggctactagctagataaataaataaataaataaataacagagaacatctaaataagcacaatcagaaacaacaaagatgacattacaaccaatcccatagtaatacaaaagatcctcagagactacaatgaacaccactgtatacacacaaactagaatatctaggagaaatggataaatccttggaaaccaacaaagattgaaccacgaggaaactaaaatcatgaacagacaaataacaagctctgaaattgaatcagtaataaaaaacctactagccaaaaacagattcagatcagactgactcatagtcaatttctaccagacatacaaagaagagctgttaacaaacctaatgaaactattccaaaatattgaggagatacttctccctaactcattgtatgatgccagcatcatcttgatactaaaagccagcaaagacacaatgaataaagaaaactacagcccaatattcccaatgaatgtagacaccaaagtcctcaataaaatatcagcaaacaaaatccagcaacacatcaaaaacttacttcaccacaatcaagtcagctttatttttgtgatgcaattggttcaaagtacacaaatcaataaatgtgtttcaccacataaacaaaatgaaaacgaaaaaccatatgatcaactcaaaagatgcaaaaaagctttcaataacgtccatcatcccttcatgaaaaaaacacccaacaaattaggcatcaaagaaacagacctcaaaataataaaggccactctatgacaaacccacagctgaaaccatacagaatgggcaaaagctggaagtgggggctaagtgcagtggctcatgcttgtaaccccagcatgctgggaggcaaagacaggagaatcacttgaggccaggagtctgagaccaggctgggcaacacagtgagaccttgtctctgtaaagtagtaaagaaaaaaattaaagaaaaaagaacaaaaacagttggaagcattccccttgccaactggaacaagacaaagatgcccactctcaccgtatgtattcaacatagtactggaactcctagccagagcaatcaggaaaaagaaagaaagaaaagccatccaaaaaggaaaagaagccaaactatctctctttgctgatgatatgattctgtacctaaaaaactctaaagagtttgccaatttatcctggaactgataaatgacttcagtcaggacacaaaaatcaatgtaaaaatatccatagcatttctatataccaataaagttcaagctgagagacaaatcaagaatgtaatccaatttataatagccacacacaaaaaagcaaaatacttaggaatgcatctaactacagagatgaaaggtggttacaaggagaactacaaaacactgctgaaaaaaaatcatgacaccaaatagatgacaccaaaaaaatggcaaaacattccatgctcatgaattggaaaaatcaatcgcattaaaatggccatactccagagtttgccacatatgggtggtccgtctgttcctgtcccctgtgagatccagcactgaggcacaaaggacaggagagggtggggaggggtggcagcgtgagtctcactgggtgtgagctggccagccccctggctcagtgctccctcctccacctcctttgaacgggggacataccatgtggctaagaagggcaactcagcatctgccgctcaggctaggtggacagtgaggaaggggacatgggaggtctgaggcttcaaggctagtgtctccacaggcgctggcagtgatttcttttttaagctgctctccctcccttccctccgcctgcctccatcctaattgaagccatcgcctcttcagttacactgcttcctaaaatagtgttctgatcacgccctgggtgctcactgaaaatgcttcaggggctccctgccatctattggaaaaaggcagaaatccttaggctggcgtgccagggtccaatcagaaaagcgaaacccacctgggatgtttccgcagagggaacttcgtgtagggcattgttatgggcgtgggaagactgaaagggcaaagagagaccgctgggacagagagtggcagaagcagcttccacccctgcagccagagggacagaaggaaggcaggtttggaggagggcccgggtctctgatggggaagaagggccgctgctggtaagtggtgggagaaacagccttggggatggcaggtaaacctgtctcctgcctcccaccttcccttctccatctagtgtccccttgtggggaaatttaacagggaacccagagacgaaagagatggggtttgcagaatccctgcaccagagagcaaagtggtttgaagctgagcgacatttgcttcctaatgggcacaggtggcactctaggtttccgtgtctggccccaaactcctggctacactctgaccagccagcatgtcacctcctgccaagctcagttgttctggaggtccctgtcgtcagatctttgcccttcatcacccgtcaaattcaggacttcgttgaaatgctacttccctgataccttctcgtacttccattcttaaacctttgttgctgttaagtgttgagatgaaacatgtttgctttgtattctagaagtttctgtgattgaccatacctgagcgcagagattaactggggtttgttccagaaacagcattaatcacagtgcccggcacatagaagggtccagaacttggagcaagtaactgaactcaggcagttcccacgcaggccacagagttggacaaaaacagcttgaccctggggcttgcactcaaaatgagccttacccctttaagagagggcaggtcttttccctctccggctcaccccacccctcctacacagtaactgaaacctgatctaatccctttgcacgcgggtaatttattggtctgttgagcttttcttggtggcaaattgcattgtctttattcctgggttcaggctctgcagcggctcactgcattcctaggactcctttctaagggtcgatccttcacacctcctcgtgcactgcaaagtaagtcttattgggcttctttgttatgcaaacagggcggtaataatcaggctattattctgaaagattgggcttgattaacagttcaaaggaggtctctgaaagcagctagtgcctcattggtgcataaatattttcatcctgccagcgttggtgcagctggtgctccaagcgccctcccctatctttctgattctcagaggtgctaggttgctattaaaaggaaaagaactaagtcaaaaaaaaaaaaaaaaaaaaaaaaaggccatactgcccaaagcaatctacagattcaataccattcctatcaaactactaacgtcatttttcacagcattagaaaaaactattctaaaatttcatatggaaccagaaaagagcccaaacacccagagccatcctaagcaaagagaaccaagcctgatgcatcacattacccaacttcaaactatactacagtaaacaaatgctacactaaacaaatcagcacggtactggcacaaaaacagacacatagaccaatggaacagaacagagagcccagaaataaagccacatgcctacaaccactgggtctttgacaaagccgacacaaatatgcaatggggaaaggactccctattcaataaatggtgctgggatgactggttatccatacacagaagaatgaaacttgacccctagctataacaacatacaaaaattaatgaaagctgaattacattcttaaaagtaagacctctaactataaaaatcctacaagaaaacctaagaaatgcactattagaaatcagcctctgaaagtaatttatgaataagccctcaaaagcaattgcaacaaaagtcaaaatgaaaaattgggacctagttaaacaaaggagcttctgcataggaaaaggaaccattcaagagactaaataggcaacctaaacaatgaaagaatgtatttacaagctatgcattgaacaaagttctactatccagaacctataaggaacttaaatcaacaaacaagaatttaaaaaaatatataaaagcgggcaaaatacattaacagacacttctcaaaaaaagacataaaagtggagagcaaacatatgaaaaaatgctcatcatcactgatcatcagagaaaagcaaatcaaagccacaatgacataccatctcacaccagacataatggctattactaaaaagtcaaaaaataagcaacaacaacccagattttggcagagctgctacagcgaaaagggaattctaatacactattggagaaaatggtaaattcgttcagccactgtggaaagcagtttggaggtttctctcacggaactaaaagtagaactgccattcaacccagcaatcccattagttggttaaatatccacttcccaccaccaaaaaatcattctaccaaaaagacacatgcacccaatgttcactgcagcactattcacaatagcaaagatatggactaaaaccagaagctcatcaatgatgcactggattaagaaaatgcagcacatatacaatatggaatactatgcaactataaaaagaacaaaatactgccctttgcagcaacatcgatgcagctggaggccattatcctaagcaaactgatgcagaaacagaaaaccaaatactacatgttctcacttgtaagtgggagctaaacactgggtacacatggacataaagatgggagcaatagacagtggggactataagaaggggaactgggttggacaacggttgaaaaatgacatgccaggtactatgctcattacctgggtgccaggttcaactgcaccctaaacctaagcattatgcaatatacctgtgtaacaaacctgcacatgtactccctgaatctgaaagttaagaaagagaaagaataagataaaaataaaatgccctttttaacttgcaataaaaaaacaccaataacattcttcacagaaatggaaaaaacaatcctaaaattcatatggaactgcaaaaaagctagactatacaagccaagcctgagggaaaagaacagagctggaggcatcactccacctgacttcaaaatatattacaaggttacagtaaccaaaagagcaaggtcttggtataaaaatagaaaattaaaccaatggaacagaatagagaacgcagaaataaatccacatatttacagacacctgattttcaacaaaagtatcaaaaacatacattggggaaagaaccctctcttcaacaaatggggctgggaaaagtgggtatctgtaaaaagaagaatgaaaccaggtccctatctttcaccatatacaaaaatcaactcaaaatagattaaagacttaaacatgagatccaaaattataaaactactacaagaaaatatatggaaaatgcttcaggacattggtcaaggcaaagattttatagctaagttatcacgggcatatgcaaaaaaaagcacaggtataaaaacaaaaatacataagtaaagctatattaaaattaggtttcttcacagcaaaggaaacaatcaacaaagtgaagcaaacaaccaacaattgtagactgggagaaaatatttacaaatctattcatctgagaaaggtctaatatctagaatatgccaggaactcaaacaactcaacagtaaaaattgttaataatcccccctgaaatgtggacaaagaatttaaatagacatttctaaaaagaagacatacgaatgtccacaaatgtatggaaaagtactcaacatcactaacaggaaaatgaaaacaaaatcctaaataagatatcgtctcaccacagaatggctaccatcaaaaaaatcaaaaaacaaaaaacaaaaaaaccagaagtaaaaaatcctggcgaggttggaaagaaaaagaaaactcttatgcactcgtggagggaatgtaaactagtaaaaccatggaagtttcttaaaaagctaaaaatagctctccgccagatcgccgccgcgccgccatcttggacaccagccgtgtgcagcctatcaagctggccagggtcaccaaggtcctgggcaggaccggctctcagggacagtgcacgcaggtgcgcgtggaattcatggacgacacgagccgatccatcatccgcaatgtaaaaggccccgtgcgcgagggcgacgtgctcacccttttggagtcagagcgagaagcccggaggttgcgctgagcttggctgctcgctgggtcttggatgtggggttcgaccacttggccgatgggaatggtctgtcacagtctgctccttttttttggtccgccacacggaattgagatgctcctttaaataaagcgtttgtgtttcaagttaaaaaaaaaaaaaaaagctaaaaatagaagtgtcatatgatccaacaatcccactactaagtatttatccaaaagaaagaaaatcagcatatcaaagggataccagtattcccatgttgattgcagcactattcacaacaaccaagatacagaatcaacctaaatgttcatcaacagatcaatgtggttgatgagtaaagaaaatgtggtatatgtccacagtggaatactattcagccataaaaaaagaataaaatcatgtcatttacagcatggatgaggacattaagtgacactaagtgaaataattcaagcacagaaaaataactactgtatgttttcactcatgtgggagctaaaatttaaaaaaacgttcacggaagtagagagtagaactgtgggtattagaggctgagactgagaaaggtaaaggggagtagaagatggggagaggctggttaatggatacaagattacagttacataggaggaatgaattctagtgttctgttgcattgtagggtgaatatggttaactaatattttttttttttttgagacggagtcttgctctgtcacccaggcttggcgtgcagtggtgcaatctcagctcactgcaatctctgcctcgggggttcaagccattctcctgcctcagcctcccaaacagctgggattacaggtgtgtgccactacacctggtttggctagctaatatttaaaaagctagaggagaggattttgaaagttcacaacacaaatggtaaatgtttgaggtgatggaatatattaattagcctgatttgaccattatacattgtttacacatatcaaaatatcactgtgtataccataaatatgtacaattatacaggtccacaaaaaatcaaaagaagccaggtgtggtgtcacattcctgtggtctcagctacttggaaggcagaggcaggaagaattcttgagccatggaggtcaaggccggcctgggtaacataataagacaccatgtctaaaaaaaaaatacatcaataaaaataaaagcaaaatcattcatcctatatacagactatgggtgaaacttagtgacttgcttctaatgaacagaaagtgttaaaagtgataaccatgtggcttccaacattaagttagaagaggctctctaccgcagactgctcacccatggaccccagcccccatgctgtgaggaagcttaggccacaaagagagcctaggagttccaatgtagatatctgggcaagctgccccagccaaggttttcccaagccacagattggtgaactaaacgaatgttgttcttagccactcaactttgggtaatttgttaggaaaaaataaccagaaaaataaatttaaacaaggagacaacaagaaatagaataacataccagtagaaattagtctcctttaaagtaagatctaaaaaatgttgaggttaatttattaatgacaaacaactctaatgggaagcagcagacaaccaggagaaggatgtaagaactactgcagaggaagtttagaaaaagttcctttcgattacaaattctgatgactaagccagtgaggcttttagaatttgtcccccgagttatgaaataaggaagatgaagaaggaaggagatatataatttgaagtataaagttgaaaaaaccagaaatatttgattaattaccaaaaatcagacattgtacctgatttcaatgaactgaaattctaaaagtgataagcagctttggatatttattaatcaatctaggattcaatcttcatttccatttcctcagtgagaaaattaacaaaatattatggaatcagttttaacaatctcagaagtaaaaatgtagtgtcctttgagtgttaagctattaaatgcaatttcccctttaccttacttcaagctcatttgtatggagaagggaagagcatctcatctttatgttgtatcaaaatgcttctccatatcatacaaattggctctgaaattttgaaattcatacaactaattcaaccatttgtttctgataaatgcctggacatgacctgatttccagttgctgcactcctggaagttgttctttgaatgggttgaagtatttattcaatgaattatgtattgaactataaaagcatagctatgcatctctatttaagcaaaaagaggtaaatgcagggaactctggtttctgagaatgtagtatctgtgccaagaagaggattcagctccgggagtgtacaagagaaccaggtgctgggtcaaaagagtatctaactgtaaactgcaacatgatgaattagctcaatttccaatgaggaaagaggacagcctagacttaatcttgcccttcatagatagttaaaatctacacatgactctatgacttacaatgagttaataaaaacataatgcagtaaatagtaggagtcagcatatcctgtgaccaagatttgatggaaatgggaatgaagagagaggcactgggtgagagacaaaaggtatgactggagaaaaaaaattaatgggatctgtcttcataagcctgactctcatcatgtcatggagtcagcaaggcataagctggccatacactccttcaagaagcaaaaagtgaaattaaagacattctactacttgaatttctattcttacataagacaactggtaataagcaacaggactgaaaatgaattttcctaaaatgtgatttgctactggcataaggatagacatagctcaatatattagaactgagaatccaaaaacaaacacacacttttatggtcaactgattttcaacaagggtgtaaaaaaaattaaatgagaaatgaatagatttttcaacaaatggttctgggaaaacggtatatccacatgcaaaagaataaaggtggacttcaccaaatgtcatacctaaaagtaacaaaatagaaccgctaaatgtaagaactaaaactataaaattcctagaagaaaacatagccataaatctttgtgaccgcaaaacaaacaaaaaaaaattaactggacttcatcaaaatgtgaaacttctgtgcttgaacagagaccatcaagaaagtgaaaaggaggctgggcatggtggcttacacctataatcccaacacttgggaggccgaggtgggaggattgcttgagctcaggagttcaaaaccagcctggacaacatagtgagaccttctctctacaatttaaaattatataaattttaaaaacataataaatcataaaaaagaaaataaaaaggaaagccattgaaaatatttggaaacatatctgataagggacttacacctagggtatataaagaactcttaaaattcagaaatttaggacaacccaattttaatgtgggcaaaagatttgaacagatatttctccaaagaagatatacaagtggctcataagcacataaaaagaggcttaaagtcattcatcattagggaaatgtgaatcaaaaccacaatgaggtaccacttcatacctctaggttggaatcctttttcaatcaaaaatatgaaaaatgttggcaaggatgtggagaaattagaaccctcatacaatgctgatgggaacgtaaaatggtgcaaccactttggaaagcagactggcagttcctcaaaaggttaagcatagtgttaccatatgacccagaaattcaactcatatgtatatacccaagagaaaggaatacatatacaaacacaaaaacttgtaaataaaagttcacagcagcatgattaataatagccaaaacatggaaacaacccaaaggtccatcaactgatgaatggctaaataaattagtggtatgtccatacagtggaaaattactcagcaataagatgaaattaaatactgatacatgttacaacacaatgaaccttaaaaatgttatgctaagtagaagaagccagtcacaaaagaccaccacacattgtgtgatccaattgatacgtggtgtccagaatgggctgatctatggaaacaaaatagattgctgattcttgtcagggtcatgaaaatgtcctacaattgatgatggtgatggttatgcaactctgtgaatatattaagagaccatgaattgtacacgttcaatgggtaaactgtatggtatgagaattctctctcagtaaacttgtttttaaaaattcagtggtagaatctagatatatctcttaattctctactttggatgtacatactgtacatgatttgtaaaaaagcacaatatatttaaaatgaaaggaaaataaaggaagtaactaacatttcaagtagtttgtaaattaaaacatttgcattttggagaacagtactatggcctttctgtaccagttatcctgaaattcatgaaataaatatacacagattctgtacccattcacaaaagtaaagataagaaataagacaattttctggaacattctattaaacattatcctataatttaatctggcttgcctcaccatggcaatagagaaatcactaaaaaaatactacttcacaggaaaaaaaaaagcctctcaacttctgtgaggaatactgaataattcccaattttcctaaggatctttggaaatgatccttatttttaaaatgtatgtacttatgaggagaaaaggacagaatgaaagccagaggttaagaaacaagtgtattataaagataattaaattgtaataaaatgaattataataaaaatacaaaagaaagctatccactgcaatcagtatcctaaaacatctgacattatttcaccacctatagattaactgttgacatgttatgtttcatacaaacttcatttctgatttgacccaatttcttctttgaatcctgtgtctcatctaaattaatgtgacaacgtgaggtagcctctgacgtaggttgttgttttaggagatcggtccattcttgttggaattctctcataactacctgtgaaggtattttttgttactgatttataaatcaccttattattaaattatggtagtaagatttaactctaactcatatactttgaaaaacatcaacacatatatgattcgccttcttttcctcatgtgcacacattcttgtttattactgaatttagttaaggacaaagaaggtgttatcttcctgccaaatcggttttctgttaacttaggcaatagattcagcccactactcactcttccctgaaacatctgcagtgcttaacaacctactgaagtctcaaaaagaatttgatacgtgggtggggctgctggtggtacatcccacactggtaaaatgttttccctgttttttattagaagctcaaatcaacctcagagttccttgcatattcaattgcctgctcagatccttctaaaagattcctatctcacaatacaagtaaaattccaatggcctttgaggccctaggtaacctggcctctacctccctcctgatctcagctcctacaactgtctcaccgattcagtccattcctgctatatgtgaatcctgccacttctgattagtttgaaaatgggactcaatgccaaacaaataaatcacagatagccacagttacctttgtactatcaaagttatatccgaatgataggcagtgagccttgaaatgaaaattatgagcaaattctttgtaaaaacattcaaagtaaattataaataccagtggtaagattaaatgtaacatggctttgctgaaattcacatctgtcccaaattatgatttaataaaaagtaaatgcctttaggccgggcacagtggctcacgcctctaatcccagcactttgggaggccaaggcgggcggatcacctgaggtcaggagttcgagaccagccttgccaacatggcaaaactccgtctctactaaaaatacaaaacttacagagcaagattccatctcaaaaaaaaaaaaaaaaaaaagtaaatgcctttaaagaattgagaggtcataacaagtaatttgagactgaaatcgtctcagatttaagacaaattgatatgaataaaaataaaattataccaacttaaatacattacaaaattactgaaggaaaagtattatgagatacagcagtatacttcagttcacctgggaaatctggaattaacggtcaaagcaaccctccccactgaatcttaatttcaaaatactcatgtcaggtatgagcatttctgtttatctgcttcatcatggtattaaaacatggccacataaaggcattgcaatgatcatttcagcagcataagactacatcatgagtattagtctgtacctattaacactgtaactgaacttgaaatttcataggtgacacaatttctttatgcaaagtaaagcatctttcaggtttaacttctttttcactggtacatttctaggctgatacagcaaatacatttatgatctatacattttatattcaactagatacaacatttagccataaccaaatattactttacattttctttcaggaaggttgaaaaatattttatctttcttaatacttacttttcttcctgctttctctttctcacattgatccattctttcttttaaatgattatattcatccatcagctccttgttcttctcttgtagtgaaagaatctgcttttcactctcagcttgaagatttttggcagcagaatgaaactggtcttggatagtactgcttgtcttttcttgactgttagctttcttgtgagcatcatccagttgctgtcgaagcaacgtattttcactttgtagttgagataatctctcctctacagattcctgcttggcaatgtatttcttcagtttgctttgttcaatttggtacatttgttcagtttctttcttctgacactgtgtttggctgaggtctctttgcacacgttccaaaatcaaactctctcttccaagagcatctcttgtgttatggagctgaatttgtaggctgttaattttactttcagcattagaaagtttttcagaaagaatctcattcttagcttgtaggccagacatatcaaccttcattttgtcatgtaaacgaacccactcttgtcttgttctctggaaatcaagttttaggtctcttgctgtctgactttgatcacagtcacgtacagcagcagccagtctacaacggtatgattccatttctatttctagtctttcttggttctgtttcccattctccagttcagaattgagtattttgttctcagctgtcagattgttcagctgtccactgtactggagtattgtttctgttaatgtttcctcatttagttttataattttttgaaggttatcattcttttctttcacagcctcaatgtcctcaaaatatttcttttccttttgcttgttctgattttttattgtatctatttccagtctcagcaaggcaatttcttcctgcaacatgcaattttcatgaaagagatgcttttctttctgatgcctatgagaaatctaagtgagaaaggaaacattcagtagcactcaataaaatgacagattatgattttctctgaaattaaataacctatacatgtatacaatgaaaagattgccataagtggatatccaactggaaaaaaatattctatcgaaacttcaaacctcatagagcataaattcccaaaacttcataagtttatttgaagacaatgaatccatgaatgtagaacataaataactagagaaattttaagcatctcagaattggaaaagacggtctccaaattacaacaaactcaaaggcattaaagactaataaatttgactacattaaaaaattggctttacactctgacatctaacctatacaccaccctatagtaaaagctgtagctttgcatatatctggacagaggaaatgttccaacgttcttgaagttctttttttcctgagaatattctatagctatttatttttctaacatttttatcatcagttatataagaattacatttattcataaatgctaaatctaagcattatattaggctttttttttttttttcgagatagggtctccactccatcactcaggttagagggcagtgacgcaatcaagactcactgtagccttggcctcctgggctcaggtgatcctcccacttcagcctcctgggtagctgaactagaggcacacacccccacacgcagctaaatttatttgtactttttgtagagatggggtttcgccatgctgcccaggctggtctggaactcctgggctcaagtgatccacccacctcggcctcccaaagtgctgggattacaggcgtgagccgctgcacctggccttgtaccaagcacttgtacatgtatcactgaactcatttatatcacaattctgaaaggagaggtcaaaaaatatgcaagttgcaggattttccctaggtccccttactttacttctagtgctcttccaccaaaccacaattacttctgtgttgtgtatatataaatataaaagaggcttatttcaaaacaccagtggtaaaaaaagaagttacagagcttttcttagaaaatcatgagattatctgttattacaataacttaagtttcctctttataatgtctgaaacagaaataagcatgaaacagggtgaaatacactgaactatttttcttttctttttttttttttttttttgagacggagtctcacactgttacccaggctggagggcagtggcccaattttggctgcctgcaagctccgccacccagggttcacgccattctcctgcctcagcctcccgagtagctgggactacaggttcccgccaccacgcctggctaattttttttgtatttttagtagagatggggtttcaccgcgttagccaggatggtcttgatctcctgacctcgtgatccacccgcctcagtctcccacacactgaactatttttctaagaaaaaacacttaccaataaattatcaccaagtttatattatggcatatcattgttttcaaagctctttgcactgaaatgagacgctacttggagcaaactgttactctcctcaaaagtaagggaaacggcatctgaagtacggcctctgaactggctatacatttcatccttactgcaagtggaaataataatctaacctctccattaatatattaggaaaatgaaataatgtctgaaaactagaacgtctgttgttagtagcaaggattttgagattgtggaaagatcattaattctatgaaaaataacaaatgtttctcctttggataaggccattgtgaatgtcactacttgactcttgcaaacaaatggagttgaattaagaacatgactttattcaatgagccaaaaatgccagaaccaccatcaccacccccaaatgtatatgtgtgtgtgtgtgtgtgtgtgtgtgtgtgtgtgtgtgtagttaaaaaatccattgtactttccaagttgcacagagttgtttcttaaaaatatattcacatacaaaaatatatttgaaaatgactaaagaaaatacctcagaattcattttcttttgagccatttctagttccttttgtttacttgtcagaatctgatcttgtaatattctggcatcctgttcttcagaaagttgcttctgggcatcgtttctctcctgcacaacctagagataacatggaggttttggtctaatagcactgaaaaagaaaatctaaaaggttaagagcagagcctctcttataaaacggttaaaaagaagtagcctgttaaaacacaagaacttttatccctcaagaatcactcaaatcttaattgcatacatgacagctcaatctgtcaaagaggaaaaacagttcttaactacaggaagatacagcattgtgaaataaaatttctttcaaaacatttaactagtgtccttatagtttcaaagctatttagcctgtattttaacataaaaaatgtgtaaatgaacagctatattagtgattaaactcaacttatcctccactctaaaaacacagactgagcatctattagatgacaaggtttacagtaaataattttatctataaatgtcatagttcattcttaagaggaaataacagttttggtttattttaaacctaaatgatatacatgaaggcaaaaaattataagtaataccgatgaaacataaagttagaaaaatgaagtttacaccaaagattaatttaccagatccaagttatttcttactgtcctcaattccttaacaagtcttctcagattccatttaagttgttgctttgtttcaaccactttcccacactcctcttcttttattcttaactgttcactatctttattatacaacatatcggcatttcttttctcccattttcttgttttaaggcaagtctgcagttaaacatggattacattaaaatgtgttttgttaaaaaataaaaaagtttattctgtgatctggctcttcccatgtgggtttattatcctcataaaaactcctatgctcttgtttcctttctagttctcatgtttttaatttctcactttgatctcttccaagggacatatatatttgagaggtagtgaggaaagaaatattccattaactggtaagtttctgttactagtaaccctggtaaatattatggaaaagcatatttgaaatttttcagtaaagttacaagttgaaaattacttctttttcacgttatgcaagttgaaaattaattagatcatttagagttaatttaaaagaagttactgtttacaaacaagtttagaaattcactagaaatgcattttcatcttcatgaaatagtgtatgtgtagtcataaaaatgatttacagtgtaagataacaccttcagatgtcattcacacaccatgtatctgcagattactacaatccaagactaggctaagctgtctataactgttaccccatcctttttatgtttctcttctgggtaacactttcaacttatcttcttgattcttaagtatttcatcaccaattttaaaatccctttttggaacaagacaggatctaatatttaatttaaaagtaaaggataatatgtgtttcaacaatgagtttggaattaattttatctgcatatgagagatatgtaataaaataatcatcaattactgtccattttacttagttcgtgcatatttagaataaaactgggaagtcctagccagagcaatcaggtaagagaaataaagggcatccaaattggaaaagacaaagtcaaactatctctgttttagcttagaaaaccctaaagactcctagatttaatcaatgaaatcagtaaaagtctcatgttacaaaatcaatgtacacaaatcaggagcactagtaaacatcaagaatgaccaaggtgagaatctaatcaagaacctaatcccttttacaacagctgcaacaacaacaacaacaacaaaaacctaggaatatacttaaccaaggaggtgaaagatctctaaaaggagaattagaaagcactgctgaaggaaatcatagatgacacaaacaaatggaaatatgccctatgttcatagattagaagaatcaatatagtgaaaatgatcatattaaccaaagcaatctacagattccatgcaattcctattaacataccactgtcattcttcacagaattagagaaagtacccctaaaattcacagggaatcaaaaacgagcctgaatagccaaagcaatcccaagcaaaaagaacgaagccagagacatcacattaccagatctaaaaccatatgacaaggctaaagtaaccaaaacagcatggtacttgtataaaagtacatacgtagaccaatggaacagaatagagaacctagaaataaagccaaatatgtataaccaactgacctttcacaaagcgtacaaagacataaactgggcaaagaacaccctattcaataaatggtgttgggaaaattgaatagccacatgtagaagaatgaaactggatccctatctctcaccatatataaaaattaactcaagatggattaggcctaacatgtggctcacatctgtaatcccggtactttgggaggccaaggcaggagaatgacttgagcccagaagtttgagaccagcctgggcaacataatgagacctcatctctaccaaaaaaaaaaaaaaatgtacatatatatatatatatatatatatatatatatatatatgagaaattacctactgaggtacaatatgtactactcaggtgatgggcgcactaaaatcccagagttcaccaccatacaattcatccatttaaccaaaaaccaaaatatatatatatatatatatatatatatatatatatatatatatatatttttttttttttttttttttttttttttttgagacagagtctcgctctgtcacccaggctggagtgcagtgacacggaggccaaggtgggagaatcacctgaggtcgggagttcaagaccagcctgaccaacatggagaaaccttgtcttactaaaaatacaaaattagccaggcgtggtggcaatgcctttaatcacagctactcaggaggctgaggcaggagaatagcttgaacccgggaggcagaggtagccatgagccgtgatcacgccattatattccagcctgggcaacaagagtgaaactctgcctcaaaaaaaaaagaaaagaaaagaaaagaaaaggcttctgcacagcaaaagaaataatcatcagagtaagagaacctacagaataggagaaaatatttgcaaactatgcatctgacaaaggacaaacaaatcagcaagaaaatgcaaataatcccatcaaaaagtacacaaatgacatgaacaaacatttttcaaaagaagatgcacaaatggccaacaaacatatttaaaaatgctcaacagcactaatattcacggaaatacaaactaaaacaacaaggagatatcaccttactccagccagaatgctcattattaaaaagtcaaaaaacaatagatgttggtgcagctgtggtgaaaaggaaatgcttatacactgctggtggaaatgtaaattagtacaacctctgtgaaaaacagtagacagatttctcaaacaactaaaatagagctaccattcaatccaacaatcccctactgggtatctacccaaaggaaaagaaatcattatatcaaaaaaaaacacctgcaaacgtatgtctattgcagcacatttcacaattgcgaagatacggaatcaacctaagggtccatcaaccaatgaatggaataaataatatgtggtatatatatgtcatggagtactactcagccataagaagaatgaaataaatgtcttttgcagcaacttggaagggactggaggccattattctaagtgaactaactcaggaatggaaagccaaataaaaccacattctcactcataatagggagttaagctatgggtgcacaaatgcagacagagtagtataatggacatcggagaatcagaagtgggagagtgtgggaggaggatgagggatgagaaactacctactgaggtacaatgtgtactactcgggtgataggcacactaaaatcccagacttcaccaccatacaattcatccatttaaccgaaaaccacttgtatacctaaagctatgaaattaaaaaaaaagttttcaaaaacaataaaactgtataaattttttgaaaattactttgggtttagaaaagtgaccagttcatgctctgttgcttgaactataaattaacacaaacattcttgtgaaaaattaagaaatattgatcaaaggtctttttaaaaagttcctatatttcaaccaataattctatattggagaatttattcaaagcaaaccgtttaggaatgtagaaaaacatttatataaaaaatgttctgggctgggcatgatggctcatgtctgtcatactaatgatttgggaggccaattttgcagaaggaatgcttgaggttgggaattggagatcatcctgagcaacatagtgataccccgtctctacaaaacacttaaaaagttagccaagcatgagaatgtgcacctggagtcccaactacttaggacgctgaggcaggaggatggagttcaaggctgcagggagatatgatcacaccagtgaactccagtcccaggcacagagaccctgtatctacaaataatagtaacgataaaagatgttccttacatcattaattataaatacaagataattttaaaacccaaattacaatttgttaaatgaataacaagattttatatggtggacttctatatggccatttagattgcaaagaatatacatttatttattagaagagttcacagttaataatttgttttattatttccaagaatttcatattccacaagaccaaaaaggtttctcccccattaatctgcagaaggtaagtcagcagttacaaaaattctgatatattgtctttagtataaatatttctttagaactagaacatcatacctcaaatcgtacagctctttctcccattcaattttttgaagttctaactgtaattttgtcttttttgtttcagatagctcattttgtagtacactgaccatattttccatttgtttaagttttactgtaagttggtcacagtgattattcttaagtttcagtaagtgttcacacaaacaaaatgtgtcttggattcttggtaggctagcagaatctgtgtcagggagaaaaggtagaaataaaatatatgagtacttttaggtattaaaaaactgtgcatttttaacattgtctccttcatacattgaacaaatatgcactgagtgcctacaaagtgggagacattctactaagctctgcagataaaacagataagacctctactctcatttagccttaagtgaagtgaggaacaaacacaacaaaaatgacaattataaattcagatatatggtgtaagaaaacagagttctatgatcacacagaagaatttgatctataatgggcccagggaagatttccctgaggaagagatggctacactgagaaatgaagggtgagaaggaagcagttaagcaaaggggtagaaaagcattcttgccagtcgacagcaggtgctgaagctctgctggaatctgcttctggccacaatggacagcaagtactgatttaccttcttgcctgaaacaaccaaaaagaaaacagacaaaatatattatacaatgatttaccaggcagtggacttcaggtaatgaagacaatgatccccgtaagacaggaaacaaaggaaattcatccaacactccagctccctgccttcacggagtttccaggctaccgcacagagagaaaaaactgacatagagtccaccagattccctgagatgagatgatgaagctgagagtctggtaaagccaaggcagacagagatcacgaaacagaacaccggaaaggagacagagtacagggaaagaacactgaagatttgcaaaaatacctcctgggtatctagcagagtaacaaacagcacatgtgtgccagaaaaaccgccccagatcaaggggaaaaaaacatctaaaaaacactggaaagaaacatgtctggtgttcacgatgtgccaaaaagagtgtccattcccatgagtgatgctgggaaaactcagacttcgcatggcaatgaatagagtcatcacaaagatcttgcctcaggagcaggaaattagaccaaatcataaaagcaagatcagaaagatcaagctgttcatatggaactcaactgtatattaaaattaagctcaagcagacaggcagaggcatggaagatttttcttttttttttttttctcttttttttttttttttgagacggagtcttcgctgtgtcgcccaggctggagtgcagtggcttgatctcggctcactgcaagctccgcctcccgggttcacgccattctcctgcctcaggctcccgaatagctgggactacaggcgcctgccaccgcgcccggctaattttttttgtatttttagtagagatggtgtttcaccgtgttagccaggatggtctccatctcctgacctcgtgatccgcccacctcggcctcccaaagtgctgggattacaggcttgagccaccgcgcccggccggaagatttttctttaaagcaaactacacttgtagagattcaaattacagtgtcaggaatgaaagctaaaatggatggaagtgaacacagattagacatcaccaaagagaagattcataaatttgagacatcagtgaactatgagaaaacttcaaggaggaataagtccccaaagagggaaaaagagagacagaaaaataaaaaaagaatggccaaaactttctaaatgtaaagaaaactataatcctacaaatccagaagtatctggctgggagagaggaaatgaaagtatactattccaattttcttttttaaaaaatttcaatagcttttggggtaacaggtggtccttggttacatgaataagttctttagtggtggtttctgagattttggcgcacccatcacccaagcagcatacactggatccaatccgtagtcttttgtccctcacccccctcccactctttccccacaagtccccaacctgtatcatttttatgcccctgcatcctcatagcatagctcccacttacaagtgagaacatacaatgtttgggttttcattcataattttcttatgccatatatgatatgccataatattttttgaagatggactgtgatgttaaaatcatatactataaattgtagtgcaactgctaagatagaaaaaaatagttatcactaataagccataaaagggagataaaaataaatcataaaaattactggactaattgagaagaaagcagaaaaagaagagaacaaagaactggggggaccagtggaaatcaaacagcttgatgacagacaaatttcactgtatcaataagcacattataaatggaactggcctaaaagtctcaattaaaaggcagattgtcagactggataaaaaggcaagaacctactccatgcttcctattaaaaaaagcactttaaatgtaaaaacataaattgttcaaaagaatggaaaaagatataccaggctaagagttgacaaaagaagcctgagaagaaatggctatgttaataccaaagtagatttcacaccaaaaaaaaaaaaaaaaaaattaccagctataaacagtcatttcctaatgacttttaaaagttcagttaatcggctgggcgcagtggctcatgcctgtaatcctagcactttgggaggccgaggcaggtggatcacgaggtcaggagattgagaccatcctggctaacatggtgaaaccccgtctctactaaaaataccaaaaaaaaaaaaaaaaaaaattcagttaatcaagaacgtgtaatctcaaatgtttgtgcacctaataacagcttcaaaatatatgaggcaaaaatcaatagatgaaatagacaaattcacaagtacatctgagatttgaatatcacttactcaataagtgataaaacaagggagctgcaaatcagcaagaatggagcacacttgaacaacaccatgcttctcaagtacccagtgagcacttaccaaacagaccacattctaggttctgcaatcaatctttttttttttttttgagacggagtctcgctctgtcgcccaggctggagtgcagtggcgggatctcggctcactgcaagctccgcctcccaggttcacgccattctcctgcttcagcctgccaccacgccctgctaattttttgtatttttagtagagacagagtttcaccgtattggtcaggatggtctcgatctcctgacctcgtgatccatccgcctcagcctcccaaagtgctgggattacaggcgtgagccactgcacccggcctgcaatcaatcttaatgaaagaattaagtcagaaagatttaagtcatacgaagtatgttccctgaccacatggcaatcaagtcacaaattagtaacaaaatatctcatcaaaatattcaaatattttaaaacaaagtaatacacatctaaataaccctaggtcaaagacacgatgcaaagagaaattagagagtattttgaactgaatgaaaatgaaaatactacatatcaggatttgtggaacacagctacaacagtacttaaaattttttagcacttaatgtctatattagaagactctcaagtcaatggtcttgacttttatcttaagaaactaaaaaaagagaagaaactgaaaaagaagaacaaattaaactcaaagcaagcagaggaaatgatacaataagcatctggtattgtctgacatttgcatcctcccagaactcatatgctgaaacttaatcacagaggtgatgttatcagaagctggggctttgtggaggtaattagctcatgggagccaagccctcattagtgggattagtgcccttatatatatagaccccagagggctcattcacctgttctgccatgtgaggacacagggggaaaaaagagatctatgaaccaggaattggtccctcaccagacaccaaatctgccagcacctagatcttggacttttgtgagaaatctatttctgttgtttataagctacccagtctatggtattttgttatagcaggccgaacagaccaaaacatcaaagatgaaaccaataaaatggaaaaacaataggaaaaaaatcaataaaaccacacactatgaggaggtcaataaaagtgataaaactctagccaggttgatcataaaaaagaagatgcaaattactaatttcagaaacatagtaatatgacatttttatagattctacagatactaaaagaatagaaatataataaggtaagctttatgtgactaaacatgacaactttgataaaatggacactttccctgaaaaacaaaaattaccaaggtccaatttaagaaggaataacatgaactgtcctatatctataaaagaaagcataagtaaagccttcctagaaagaaaactccaggcccagatagctatgctggtgaattctaccaaatatttaagaagcaatataacaattttacatgacctgtcccccgccctcaaaaaaaaaaaaaaaaatagaggagaaatacaactcattctgtcactctagcattaccctgaaccaaaatctgacaatgatattacaaaaagagaaaactccctcatgaacacggacgtaaaaatgtaaccagtttctcaagaaaccaagatatcctcctttaggtgagtgaacaacttctggtacagccatgcgataatgagctatcatgccatgagaagacatgaaggaaccacaaaggcatattaccaagtgaaagatgccagtctaaaggctacacgctgtctgataccaactaaatgacattttggaaaaggcaaaactatagacacagtaaaaaaagtcagtggttgccaagagttggggagggaaggtgggaaaagatgaacagatgaagcacaaaggagttttaaagctctgaaattactttggataatactacagtgataaatacatgtccttatacttttgtccaaattcacagaatataagacaccgagactgaaccctaatataaactatggactttgggtgattatgattatcaattcaggaacatcaatgagatcaagtgtagcactctggtgaggatattgataattgtggaggctatgcacgtgtgggggcagggagtacagggataatctctgtgccttactttcaattttgctgtgaagctaaactactctaaaaaatagtcttttaaaacgctctaaataaagctttggcaaatcaaatccaatgatacattagaaggataatacatcataaacaagtggggtttatccctaaatacacggtttgtttgacagtaaaatataagtattcaccacattaaaaaactaaaagagaagaaccatatgatcatctcagtagatagaggcatttgataaaatacaacattcattcctgatttaaaaaaaaaaaaatccctctcagtaaccaaagaatacaagggaacgccatcagcatgataaagagcatctctgataaacctacaactaacatgtgtcatgatgaaaaactgaatgctttccctgtaagatcaggaacaatacaggaatgtctcctttcactattttagtcagcattgcactgaagccagtgcagttaggaaagaaaaggaaataaaagctacctgagttgaaaagaagaagtaaaactctctttattcacaatcatgatcacataatagggatgggtaaaatccaacctgcggagcagcttcttatttttgcaaataaagttttaatggaatgcagctgtgttttttaacatatgtattgtctatggctggtctcatactacaatggcagagttgattggctgtgacagagaccattttgtcacaagtttaaaatatttactatgtttagtaagataacagtttgaaaatgaaaaggtttgactatctttggtgtatgtaaaaaagctgattgaatcgaatctcaattttaaatgttcataagctacccagattggaaaagacagttcacaggtggcaaataagcatatacaagatgctcaacattattagtccttagggtaatgcacattaaaaccataatgatatgcataatacacatccatcagaatggctaaaatttcaaaatttaaaaacagcaataataagagcttgtgatgatacagaacaacaagaaatgtcgtatacctctggatggaatgcaaaatcaatacaaatactttggaaaacaatttagcagtttcttaataaagaaagacaaagggacaagaagagacttttatggatgatgaacatgttagctctcttgattatggtggtttcaaatgtgcacacgattgtatattttatatacgtgcagtctatcacatatcagttatacctcactgaagctatcagtgctggaacaaacatataagacacagagtgggacacagagaaagagaagagtaaaaacgatgcaggataaagctagaggattcagatctctaaccttacagcaataagaagtagtagctgagttataagcaaaggagtaacatgatcagatccaaatttttaaaaatttatcattatgattgcagagtagaccatggttttaggaggtggggtatttgggaaaacagttctaagattcctaagattctcgcagcattccaggtggagaaaaaaatggtaacctgacattgggggaaggaataggagagaaagagtcaacaaaaagactgggaatgccactcacactgagagaagtacagtggagttatcatagctctttggcgtagagtataagctagttctctattttaacactgagcgtatttctgagatgagcttcactatcacgcgtcagttctcagcaatgtatacacacattactgcaggatacatcaaaaggccttgcatttatgcagtggtcctacctttatactccattctaagttgttcaatcagcaacataaaattctcataaacagagtgagacaattcacaatcctctgaggctatttcagatggctccattgagtcagcaaagtcagcctcaggatatatttggtttttgacctataagataaataatactgtttcaaaatgtccttcaaagatttatagcatatactaaaggtacagaagtggtatttctccattttttttgtatgagcaaaaatacaggtacttcttaaagcaacagattgttcttaaaaggtaccattatcaacggttactgtttcttcatcactttttctaagcaaacagccttacaacaaaacatcttgtttttttcatttttaccttttagaacttgttttttaaaaacaatattttagatcatttccttttttacaataccttgttcttttcattagctgttttatctgcaggcctgaaaaaaaaaaacaattccttttagaaaaatagcaaagatgtaaaatacaaagaatatctaacactactgttttatcatataaaatgtctgcatttgtgttacttctattcatcaagtgtataggtaattttttttacaggtaatgtaaaatgcagtaattttctacaacggacattaaactataaacagaaacagcaacattaagggataaagaaatttactactactaatataattacaaagaattaaatttaggtcaagatttctcatagtaaaaccaaaagaaaaaaacatgttacctgcattatgtgataaaaataaatataccagggtcttctcattgttgtccttttcaataaaaacaagcttttacgggcactaaaacctatttggaaaatattactcacattcttatataagggaaacccttttttaatgatgatattagtaagctttttctggacttactatgcaggtactgtgcatcattctgagcactgtccatgtgtcaaactcatataatcctcataacaattctgtgaggtcagtaacatattaagaattttataaagaaagaaaataggcacagaagggccaagtgactgtcctcagcccatacagctggtcagtagcagacccagaactcaaacccaagaattctgcctcaaaaacatgtgcttcatgatatgctgtgaaggtaacatttattttcaagtgttttaaagagagatgatagcagatgaacccacattgtcattccatttctgactacaactataaataatgtcagaatcttgcaatttttttctaataaaaaaactttatacagaggcaagtttagaaacctactttcaaaaaactaaaaagtatttttaatgaaatccatcaacaggtattcattcatgtattcacccattcattcacgcgttcaacaaataaatactcattgagcacacaatacatgctgatggcaatgttggtccagggaaacatggttttgatacttcagaactttataatccattgtaggtcaacttgattaaatattttttaaaaaaactttataggccaggtgcagtggctcacgcctgtaatctcagcactttgggaggccgaggtggacggatcacgaggtcaggagttcaagaccagctttcccaagatgatgaaaccccgtctctactaaaaatacaaaaattagctgggcacggtggcgggcgcctgtaatcccagctactcaggaggctgagacaggagaatcgcttgaacctgggaagtggaggttgcagtgagctaagattgtgccactgcactctagcctgggtgaaagagcaagactctgtctcaaaaaaaaaaaaaaaaaaaaaaaacactttataatccagaagtaataatctgatagattgtcaacagttagcttttctaaagtacttaaacaaaaccctccccttctccccagaatctaaacaactataaagttgatactcctgacattttagagtacctcagcagatcatacctattcatcagggatgtttaaattctattcagtatggcctaagtgtttgcatgtttattatttcacaattaaaaacaatctgcatatgatagtttaaattttaggtcaccattcacaggttcagttatgctaatatgttacatttctgaaccaatgctgaaggaacaaactcttaccataaaactctacatgaataaacactttaaggacaattagtttgctaaaaacctacaaaagatagtgaaccgagctttcaaacacttagacatacaaaattaaatctcataaacatgttatccttgtccctatcattcccagcagcatacaaacacactctaaaagcttctattttgaaataaaaaagaaagaaaattcccttgaatcccacgttcttcttcaattatcactcatttctctgttgcctttcccaataacggttccctcaaggggtatctatgcttatccactacagtcaggattccacagcaattatttattgaaactgctccttgtcaaagttaccagccctcatcataatcagtctttcagcattgatatagttgagtattctctagctttggcagactacactattttctatttccagaaaaagtaaccactgggaatattccttctcagagaaataaagaacttatacattttaacttctttcaacctcatctatttcacttaaactgctgtcatcatctccttgtagcagaccacaagttactaaattagccttctcaaacactggcgtaatcagagattattttgaggtacattttttattttcatttttctttacttcctgcatatgtaacgcagaaccacaactttaaaaaatctacaaaaggccaatgttttataataattctactgataacaaaaaaattttgtaaaattccaactcttctccatctcaattcattaattcaaaaaacacagttatgaattatcaacaacatataaagaaatatatatttcctgcctcaaaaaccaggtaatatgcaattatgatacaatgtgtagtttaagagttgatatatggaaagttatattttagcacaaggaaggcgttacagaagaggcaaaatataagaggagctcaccagggaaaaaatagagaaaactactccccttggagaatggaatgacagcacaaagattagtcccatggagtctaggtgtttcctaggaacttgaaaggaaaagtgtaaaacacaaagaaagtaagaatggaagatgaatgccacactaaaaagctggagtcagctgggtgcggtggctcacacctgtaatcccagcactttgggaggctgaggcgggcagatcatgaggtcaatagatcaagaccatcctggccaacatggtgaaacccatctctactaaaaatacaaaaattagctgggcatggtggcacacctgtagtcccagctattcgggaggctgaggcagaagaatcgcttgaacccaggagctggaggttgcagtgagctgagattgccactgcactccagcctggtgacagagactctgtcacaaagaaaaaagaaaagaaaagaaaaaaaaaaagctgaccgggcgcggtgtctcacgcctgtaatcccagcactttgggaggccgaggcgggcggatcatgaggtcaggagatcgagaccacagtgaaaccccgtctctactaaaaatacaaaaaattagccgggtgtggtggcgggtgcctgtagtcccagctactcgggaggctgaggcaggagaatggcgggaacccaggaggcagagcttgcagtgagctgagatggcgccactgcactccagcctgggcgacagagcgagaccgcgtctcaaaaaaaaaaaaaaaaaaacagctggaatccactgcacacaggcaatgactctcacacatgaaactcatatttagatctgtgctatgttttgggttttgtttttaaatataataatgtttaaacagattaaaccaagttttaaaaataacaggcacatattacatgaaagaaatcaaggaaatgtctcgggaagaaaaaaatcttagtgttaaaattcctaaatgtcagtatagtcattatatattgttcaaaaatagcactattctgattagttatatgtttgtttgaaaataaaataatttggtaaatttcccacatatttagtctagtacttagtcttaatataaaaagctggatttgccagcagaaaattgtaattacttttttatgaagtaaacacacattatatcactatcattgcatggaagagaaagtgaacaaaaaaagattaaggaataaaaaaagaatatcactatcatataactacatacattaacaaagagacaaacatttcccactggagattaggagtttagcagaagtctctgaaaatactaaaaactgaaacaaaattaataattgcttttcatttgtttgtttgtttgcttgttttttaactatgtagcgaattcttctggttaagactaagcatcaaaaaaagagatcttcctgagagcaattattaaacaattcctcttgacccacacttccaaattaagtctatagttctggaatatgaaatcattttcattttaaacatagttgatggaaggcaacttttaaacagaaaactgcagtttaaagttgtctcaaacttagtagctatatttgtaacaagcaaccacccacagccagttgtaaatacagtcaatcatcagtgaccattggcctctctcaccaaccaatatcaatgtgggccacttgcttcggaaagacagccaattaaacacaaactcgctccaatccacaagcctgggagtgttaaccaacccacagcagcctcactcagatagccatgtttctccagatgatgttaaccctcctatgccgctgagagtctgccaatgcttcaagtccgctcctcccgcaaccctatgtaagatcaacagctgctctgtcagaatacagagtgcctgatgagcatagctctcttatagaaagcaacacattccaacttggtcttttaacttcaaatactgaaggttcataatcaattggaaacaattttaagtccattaaatttaccacccttatattttaattttctttataaatcaccaatgaactatgtaattcctttgatccattttatcataagtaaaactatcatgattattagtaaaagaataaatagtgagtaacgacaatattgagcttttctctctaaatggaaaactattaatacaaagaatgtagcttattacaaagagccaaaaaatccaaaaacgcatataatttccaggcaaaagtgttagaatgaacccatgtgaaacctttttttttcttttcttttttttttttttttacctaagaatcaatctaatgtttaaaacaatacaccgaagggtaaacttcagttgctcatttaataaatatttattgagtagctacttattgcaagctaggcccttttctaggcacacaaacatcctactcatgggagtgaaataaacacaataaccatagatagattaggcaaaatatacagtgttaaaggagaaaaactaaagcaggaaaatgaaatgtttacaggtttgagaggagggatagtgggaattctaggatggccagaaaagtccttactgagaaaggggcttttaagtaaagaactgaagaaatggaaaaagaaagccaggaggctatctgaggaaaaggcatcccagacacagggaactgcccagtacagaggtgtgcctggggtgtttaagcaactgtgatagataacgaagagcaagaagtttagtgtagctgaagcacagcaaagggaataagaaacagaagtttaagtgagagagagaacagggcatattgtgtgttgccttctaggtatgaggaggaaccctgacacatactcagagtgaaatgggaggcaatcagatggatctgagcagaagaatgacatcatctgacttatgttttaagtatggccactgagttaaggattaatgaaaagaggtttctttaaaaaaaaaaacagaccaattaacagtctattacatgcgtctagagagcagatggtggtggcttggaaatggaagatatgactggcttctggatatattcttcaggtactcctgacaagatctgctgacagattagatgtgaggtgtcagagagagaggggagtcaatgacgacaccttagtttctagcagagcaactgcaagagttgccattaatgcaagtaggaaagaccatgtgaggggtaggtatgagaaagaatatcggtaccccaatcttggacctggtaagtttgtgatacccaacagttcgtgaccaatcaaacagagatgtcaagtaggcaggttggtatggaagtctggaattaaggagagagatctaggctggagacacgcatttggaaatcattagcacacacaaggtagtaaaagtcatgagaaagaagattgaggactgagtcctgggacatatcagtcctgggacatatcaatgtgtaaaaggtgggatatgagaagaaagcaaaacagactatgacagatggactggaaaggcaggaagaaaagccaggtgagtgagtgagatcctgaaagccaagtgaagacactgttatggaggagagagttttccattgggtccaatattgctgacaggttaaataaaatgaggtctaagaaacaatgtctagatttacaaatcaatggtaaacttgagaacaacaatcttggaagagtggtgggagtgaaaattactcgtatcagctcaagagagaatggacaagaaatctgaatccatgagtataaaccattctttcaaggccagcatacgtaggggcatgactgtagacgatctaattttcttcttgtttagctgtatttttcaattcttatataactatatactatatttttaacctttaaaagtttttttaaatcatatctatatggcatttttgaaatgccagatgaaggtattaaataaaaattcattaacttataaaaccaaaagacctcttgaacatttctagattatataagctgattatcattttgctcatccttatgcataaagaccaaagaagactaaaagtttcaggagaagtatttcttgcttgataaaaatcaactaactctagaatattttatactcatcaaatatacaaagtaatagtcaaaatatggaattctatgacaagaataaaaggggacaagggcagaaaataatcttattttgtaaatcaaatttgtctaaattatatgaagctactgttgaaaaatatggtgtgtttcctactgaaatacattatcttttaaaagaaaggataatggcatgcatgtagggtacctttaaaaagaggattcactgcataacagcaccttggttttagcacaaggatcaacaaatcggtgcttgtggagcaaatccagcccactgcctgttttcataaggaaatttccttgaaatgcatccacacttatgccctttataattcacaaggcctaaaatatttactaactggctctttacaaaaagagctgtccaattcttggttcagtagagctaagatcctctgttgtattttagtaagttttacccagtatattgaaaagctgacacggaacatgaatccccatgtgccatcccttggcaatattcagattaatttgaggatctggtatttcagcactcacacatggacagcaaaaaacaaaaatttaataactagaattctgttgctaacaaggtacagtgtcaatgtagcatgtagctagcttccttttgtaactcagcagatattacgagaattccaacaaaactggcttaagatgtgtcatcaaactaaaggctttaaatagactttaattgtgaaataatcagtacactcctggtctaacaacttcttttattaaaatgagtgcatgctacattattttctgggtatgacaattgtactatttccttattgctaaggatttagactatctccaacttcttgatattacaatgctataataaatatccttatacataagtatatatgtaacatatataaatatccttgacataaatatatcatatatacttaacattatatatatttaacctattagcctattgtatgttacatactacatgtaataaatgtccttaacacatatgtgtatgtgtttacacaagtcatattttcctgtaggatcttgtcccaaaagtgaagttgttaggttaaagaagtgacatatttgaaattttgatacatgctactaaattaccctgcaaaaaggattcatcaatttcatttaacaagtgtatgaaaatgcctttttcttcacatttgccaatacttcctattttttaaataaaatatcaatatgattggaaaacatggtgtctcattgttagtttgcatttttctgataaccaaggaaggctgaatatcctagtaaaagtataaaatctgttcatcatgaatattagcccaaattaggattcatttcatagcacataattgtctcctgttttttgttttcgtttctgtttttgcttttttttttttttttttgaaatggagttttactcttgttgcccaggctcgagtgcaatggcatgatcacggctcaccacaacccccgcctcccaggttcaaacgattctcttgcctcagcctcctgagtaactgggattacaggcatgcaccactacgcctggctaattttgtatttttagtagagatgggatttatccatgttggtcaggctggtcttgaactcctgacctcaggtgattcacccgccttggcctcccaaattgctggattacaggcgtgagccaccacgcttgaccaattgtctcctgttaaacgctgctataggcttacctgtcatgctcttcattttccttcctaggaatctgctgatttagtccatcatcatcattgccaacagtagtaccatcagttagggttcctgataattctgtgctattacttctgtgcttctccatttcttcttcaaccttgagtgagagtttgatgttcaggatgattcttattgctttattcaatacaaagaacttttttctgtttgcattgatttcatcatcacttgactcagtttaattataattttagtcattaaaatatttggtgcttactttaattttatcacatctggaactatcatcatataattataattattataattttatcatcaacatttttgtaaagtcagcttcatttctgtttcaatgaatgagacagaattttccaaaatttcaaccagggcccttcttaattttgtgcttttattcccaaccacccttcactatgtattatgaatttttacctcatttgactggcacaaacatggaaataagaagataaagacacaaagcgtgtcttcttctgtctttgccacttgactttcatattaaacagccagattgagaggatacaacactgtggggtttcaggaaaagaaaggaagctttcccttttctgcactaagctattcttttcccccactaacttttgtctttttttttttttttttcatttgaatcctgagatatcaaaaaggtgaaggtgcttactgaaatacaagtctgccacaacacaaaaagcagagtgaaactgctgagctagggtggaattctggaaatgagatgcttcccaaatttcacattcaatagccataaaagtttatagctggaggatatacagtataagaatctactttagctcactctctattgataactgggctaaagccaaaaaagattaaaatgattgatccaaagcccctaaagtgccattacctagcattttgtggcaccaaaagagacagtacaattccataatgctgaatcagacaaattcagcaaattaatcagataggttaaaagtgtgacttgggtaaaataatttaatgccttagcagagggtgggaggcctgccctaatcaatgtagaagactcggctttctactttggcatcatatactaagtgtttggctgagcatttatgctacttacatggaaaaaatatatatgccaaaacttactgtactttattaagcaacataacataaaggtctgattcaacagaaacagtggagagtagttatattaacaaatatattaaagtgtatatacttgttgttgaaaaatatttaaagtggtcatgatgcaattctaagttccaacagtttgagttaaacagataaacctgaaaagcacaataaacagattcattggccaggaatatttgctgcagctctcagggctggatacttcttttttcttttcttttttttttttttttagtaagagatgaggtctcactatgttgcccaggctggaatgcagcagctattcacaggcacgatcccactactgatcagcacaggagttacttatgacctgctccatttccgacctgggctggttcacccttccttagcaaatctggtggtgccccgctcccaggaggtcaccatattgatgccgaacttagtgtgaacacctgatcggcatagcacactacggcccagaatgcctggcctcaaacgatcctcctgccttaggctccctagtagctgagactacaggtgtttgccaccacgcctgctagatacatttttatatctcttcttagtcattgcttcctttctactgtattcccatcttattgttagacacaactcatctttaagtcggtaaaaggaaaaagccctcaagctcatcacatttcctttagcgattttcttgatgcctctcctggttctgaaggtcacatgatatatggctacatgagtttcacaatccatacgccacttggaagactgacagagagacttaggtcaattaagaaacaaagattatgagaaagttttcctaaactcctattacttagaaatcctctgtttctacacacaattacagatttagacaaccaaactgtatgcttttcatatgcttttcctaagtggaaaatcagaatggaccagataattgagagaaaaaacaaagagtggcagcaagtaaaaccctacctctttatgaagttgaacattttctttcttcaaagccaggaactcttcttctaatgtgttgacctcattcttaaacttttgcatgtcttgctgtaattcttcatgtagatatacttctgatgttctgtcagaatctggtggtaaagaactcagattttctaatttaggtttcaggcttttatagttatttgtactgccactgtcactattttggttcatattttttgtcatttgcaaatcaaactcttggtcttctttcatttcaaccgtaaccacttctgggttccttgctttcttagtgcttgcatcattatgaaagttgttatctgtactaaaaatatgtccaatgcctagtttgttatcattgtcgcagtctaatttattttcatgtaaatgaagcttagaagatgactggcaaacatgttcctgggacccagagtacggatgatagtatggatggatgatatttttgagactgggttctttttgttcaggaaatgtctcgaataccactgagacagatatttcagatgcatcttcttcctcacaaccaggtatgttatttgtcaaattaaagggaatatccttcacatctgttcctcttgtagagttatcaagtagtggctcttcctcaggacaagccggaattttgtatttttcataaatttcaccaaacctctgctttaactcatttatgacgagttttaattggtttttccactctaatttgccttgttcaatccacatttcctcagatttttgcacatgaggaagtactggatatataggtatatcctctctatcacaatccttagccatttctggttcttgagacgttttctgcaggtgcaaaagtggaagattaatttgcttgttttgtttcttgcgtgtcttctctgttgggctacatgttttaaaaatagctttgtccttaaataacaggtatgaacaaagaaaaattcacaaataattaaaatgaaaatttaactgttaaacttcttcatctaggtttagctactcccaaatcactggcttgtaactaagaagttaaaaacaattgtcttacctgaaaggaggagaaaaatatgaaccagcaaacttaactttgtcactgtttgtttggaataaacttaattcattatgtgttaattctaccaaaaatgaattagcagatgatttctagtgttacaaaggcttcctcacttggaaagtgagcccctacagtacatgtaagtactacatattactacatgtaagtactacatattactacatgtaagtactatatattactacatgtaagttctatagattactaactggagggtaggcaatcttcaaattattaggagcccgaatcaacaccaatcagaaagaaaagcaaattcttaagttttaattcaaattatatactgtaacatcatagggttatatatctagactatcttcttcagttcagttctaatatatactacggtcccctaataacactaactaaaactttaaagataattcttactaagtttctgcatctaaaaagttagaaatttattgtttgtaccctaacaccaaagatcccattctgcaaggtacgattcccttaataggcagttgggttgatttcataaccccactctcactgaatgtagaccgtgaagtcaatgaaaggccacatctttaacctaggcattagtaactggcaatataaaactgcaaaatttgagccactggccatgattactcttagaccatgaatccaactcagtggccatcactgttaaattgttcataatttctgttgcttaataatataagtcaataattgacattaccttctttatcctgtaaggatattgtaagaatggaagagcaaacaaaattctggaatgtttgcctctactccaagggtaaagattaactataagttatgatagattctaacaatattgtgttttataactagtttaaatgtatttaaaattaaatattaagtaaggatctattgattctcaaaggctagtctgagaggtaatttcatttgggctagcttatattattaaagcaaagaaaaaagtattaaaccagacatttagattttagtttaaatgtttccacacctgtggctgcttattttcgcatcctttaagtctttcttgctcttcctctgatgtcagctccaagtcttgttctgctgcaaaatccaaacgttcagttaaactacttagaacagttagataaaagacatagtctttataaaaatagattttaaattacatttcattttatttcataaattgagagtttaaatgaagcttgatctttagtggaatacttacttctttaagaaatacttctaattctccaaaacttcaacaaaccactttctgggagacactagatgccaccaggtaaaagaaatacaatcatgttgaagattcactcacagattcatccacccaacatcaatgaacaaagccatcacaaacaaaacaaaactttggaatgcagtagcaatattatcaggcaatgctgcatactgttctccacttcataatagtaccttattaatgatttccaaaatgactgtggacacctttattggtgtacaacctcttcctaacatctgaaatggttccctgtattattctgacaaatgtattaatattttcatcttttaaaagactgctaaaaataaataaataaaatacataaaataaaaaacagactgctaggtgaagttgaccctcatcctcatctttccccagggtaaacaggtatctaggtatctccttccttagggctgccctagaactttaatgatttttctactgcatctccaccacctgaactgtcaattattgctttacatgtctattccctctgctccttgactgtagggaacaatcttgaaaatcatctttgtacaaagagtcattatctattttactcagcaattatgtattgagtcttgctatgtgctaggcactaggatttaaagagtgaaaagcaagcatgtcagagatgacttttctagagatcctgcccgagctgaggcttaaagagtgaggctagcctaattagaaggggtaggggacaggaaagagtgagagcatgacaggcagcaacaaaaggcagaaagaggcctgaaagagtatatgagtttgcctgcaatcgaaggatgggtcagcaggacaggaccagcagttcagtaaggccagagaaagggcacacaggggaaagggctaaagatggagagctgagcagaatcacattatgaaagccttacgtataactttaagatgcttggacattaatgttctcaagagtggtccctggtcttatttgcattggtgatagaacactgtcaatgccaaaaccaacatccctagcaaacacatttattaacgcaaggtggtagctcatgtggacacagccaaggagatactatgcagcaaattctcaataagtctcattaattactgacttggaaagtcaattctataatacataaagtcatagaaatgataggaagtcacttaatatttgcttttggaaggtgttttttcgtttttgtttttgttttttgagacggagtcttcctctattgcccaggttggagtgcagtggcacaatctgggctcactgcaacctccaccttctgggttccagcgattctcctgcttcagcctcctgagtagctgggactacaggcgttcaccaccatgcccggctagtttttttttgtatttttagtagagatggggtttcaccatattggccaggctggtctcgaactactgacctcgtgatccacccaccttggcctcctaaagtgctgagattacaggtgtgggaaggtgtcttttaaattatagtgcatatagttataactaacagctgtgaattcagagctgtaaaaataaagcaaagaaaccacattgtgtttgagtcagcaatctttaggtctctactaagttatcctaaatataatcctatgttagtccctaaacatacttagtccctatattctaaatataatcctacttcctaaagaaaatcatgctttcccctaattctctgttatctagatgttgctttggttaaaggaagaacacaaatatcctgccaaaaggtattctgttcagtgcaaaaggtgagtaaacacaaagcacattttaccagaaaaagttttaagtcaaaactatagctctatgcagccaagcagaggcactctaggactgaattctctatgcttctttgttaccttctttgctctctttgttttctggtagctgtgattggcacaggtcatggagagtatcattccctgagagaagtacaactccagtgtccattttttctcgttctgttaagttcatctgtcccagttctttggttgctgactgattttcaggcattgatggtgatacagatggacttttatcaccaactttcagattcttggatctctgacaagtctcatcactaagggtcaaattagtaggatgccaatctgaaaaatccgaaaatgaagttttcatttttaggatgtaaataacacaataatttgactaacttgtatacatgctttcttcacagaaacagtcccacatcctgctctctcccacaacacactatgcattcaggcttattatattttacatgtcctatgcttacaattcattcaggtaagtttaattaactatcatctctcacttttctacatttttactgtttactattacttacttttattcactcagcagtctctattacatattttgctttccattaagattctttgtggatataaattttttaaaacataatttatgtctaaccattttaagcttaaatatacatgacagcattgtatgtatgtattgtagagacacaggatttacaaaaactcataataaatatacttttaaaactattttaattataatgagatggtcttttctcaattcaccactatcttcagaatttcctttcaaatacttggataaacttcatacatttatttgcaaaataagagctgtaagggctctaactgttcccatgtgagaacaggattagtctaggaccacactagatccaaatagcacacagtgccacgagacaggaaaggaatacataacaaaaatattttcctttttactatataaacaaaattgttgggatttaaattttttttttttttttttgagacggagtctcgctctgtcacccaggctggagtgcaatggcgcaatctcggctcactgcaagctccgcctcccgggttcacgccattctcctgcctcagcctcctgagtagctggggctacaggcgcctgccactacgcccggctatttttttttttatttttagtagagacggggtttcaccgcgttagccaggatggtctcgatctcctgacctcatgatccgcctgccttggcctcccaaagtgctgggattacaggcgtgagccaccgtgcccggcctgagatttaaattttttaagacaagtgaaagaaaaaagccaaaaacacataagtgaaactttaaagtccatttcttcataaagggtgcatttatccacaaccacatatgtggtttaaaatgttgactctcaattatgatctgagaatccctggagttcaagatccagatgaggggccaagacgtcaaataatacaaaatgttatttgccattttcactctcattctgtttcacgtgtacagtggagcttttcatagacatggtgtgtcataacatcatagctctaatggtgaatgggtcatagttctaaaggctttggaatgtatggctgagcgtgcttgtttttttttgttcgtttgtttgttttttcagatggagtctcactctgtcacccagcctggagtgcagtggcgcgatctcggctcactgcaagctccgcctgccaggttcacaccattctctgcctcagcctcccgagtagctgggactaccggcgccctccaccacgcccggctaattttttgtatttttagtagagacggggtttcaccgtgttagccaggatggtctcgatctcctgacctcgtgatccgcccgcctcggcctcccaaagtgctggcattacaggcgttagccaccacgcctggccgcatgcttgtttttaaaatattttagtttttatttctaaaatagtaaatatcaaaagacacaaccgacttaaataaaagctctttggaatttgcaataatttttctttattttaattatttatttatcattatgaagagagtttgagatccagtcatttgatagaaaaccagagcttcctgtgtcaataaggactgacctcaaaaatgtaatgtgaccagacaaaagaaagttgcaaaatatgtagagtgtaaaacaatttatatacaattttaggacatgaaaacaaattctacatattatttatgaccatacacatatgtaataaaatgttttaaaagggaatggacataataaattcttaattcagggtgttggttacctctaggcaataatatttaatcatataaaacgaaccccaggccaaaaagtttcagaatcaatgttttaaaagactgtgtccaccatgtagttattaagggtaattaattgctttcttcgtttttgataatcaaaacacacacacatgatttgctgaccagaatatctgactggcttaaaatcatcagtatagccacactatgatgaaataattaaacttaaagcacaactaacatattggcaagtaaagtttgtcttatctgataagttttggtgctgcacgttcaccttatattctttccacctttctaataccccactcttcttttgaagtattatctcattttaccaccctccatcatatccacttgcttcttttcccttcatttactctctgtactctctgccttccacattctttattcccccttttactcttatcctcttccttctatcctgacattgcatatctagggttcagtagtatccactgttccaggcattcactgggggtcttggaacataacccccatggataaggggggaaaactgtacattttattgtgtaggtctatgggtgctgtgctgtgttctgtggcaaaacatagggaagagaccagggataaggatctttgcaaagacttttcagctgccagtggagaagagctcaagggagatcaatgtactcactctcactaatcctcttctggggcagatgctggcaatgtttactgagttctagctattttccctagcacaaacaaggctcaaattcacctcccattttacctcctatggacagaaccactggaaagatcactcccttaaagagcttattcactctgagccacaccattcattcagtgagaagcttaagaagaaacactgccacagtggtggcaggttgccagggagtactacctggtatgaaaaatatatataaacagaactatcagctcactcaagctgccagaatgtgccaacagttgttactctctctggtgaaaacaacattatttttcatttattgtaaagaaaaacactggcatttcctatgacagagcatttagttgtagatgagccatattctaataatatagactgttttcaagctcatccctaaaaggaagagaaccagagaggaacatatttattcacctgtagtgttcactgcctgatcttctttttaagtgcaaggtaagtatgcaagactttgtgattccagttttataaagtccagctcttgagattatcccgtcccatcgctagactctatctggacccatctcctagagcacgatggtccagttagtgctgtggaatactgcatgatgccatttttccccaccctccccgttacgtggcaaacatctacagaaatcacgctttctcagcacgtcaaatcatacgccatcagatcctgttctgatgaacacaacatgaggaaaacaaacacaaggacaaagaacatctaaaatgacagaatcaaattaccatggaactttattgtttaaatattcaaaaagatatccaccactgttttattccaactatatgactagtctggaaaaagcaaaactactgagacaccaaaaagaccaatggttgccagaaaccagtggagaggaagagacgaaacagtggaggacagaggatatttagggcagtgaaactattttgtctgtgatactacaagggtatatacatgccatcacacatttgtccaacaccatagaatgtacaaaaccaagagtgaaccctaacgtagactgtggaccttgggggtgatgtgtctgtcaaggtagattcctcaactgtaactctgatgaactctgatggggggtactgataatgagggaggctattcatatgtcaggggtcatggggaatatggaaaatctctgtaccttctcaattttgctgtgaatctagaactgctcagaaaataatattattaattctaaagcacatactcactgaacttgctattaccctaaattataaaaagacagagtcaccttgaaaattgcaaatcactaaagatcaaggtaacagaatacgagtactatctccgaaattgaagcatataaaaacacataaagcaattaattttaattgtatacttaggcaaaaaaaaattcacaaaaatgattgaatatctgatcttatttcataattgtaaacagggatttagtacaatatgaatcaaaactggtccatccatgaaaataaaatgaaagacaatttttattctaattttaaatcagaacttattatgcctactttatcccacaattttactgaaaggttaatcagataagaaggacagattataattacttaatattgccatagtaacttatgtaccaatacctgttaagtattcaccaaatgtcaaaactgtaagcagccttgctatttaatatgaatgatgcagctgaaaccagtaccatgttatggtctatcatattatttgctattgtattatataaaatgttaagataacaccaaaaatttactcaggggcatagctgctgggcagcaaagatttcatatagcaggcatgagacacccatccttagaaaggcttgcttgcaaggctagtccttggctggtgtttgggaccttgaatttgggagggttcccagcattccctaacttagaagaagggagtggctcactgtgcctaaagtgtttgtgcaaatgtggtttactatgaacaattaatttcctcctgggagtctagagttttgttacatgtgagggagaggagaggtggcctatgtgactagcctccatcgaaaacatgggtgctgagcctctaatgaaactctggtaaggtagacaacattgcacatgtgtcgtcaaaatttgaggctgggggaattaagcatatcctgctagctacacaggagatgactcctgtagcttgtgcctggcttcctccagactttgacacatgcaccttttcctttctcaaatgttgctttgtgtctttttgctgtattaaatgtaataaatcaaagccccaagtatgactatctgctgagtcctgtgagtccttctcagtgaattaccaaacctcagtgaagggggtcttgggaacccctgatacaattgcattaaacaattttttattgtttaagttgatgtgttacatgtgactacaatcagaaggtaatttcacagaatacctttccctaatctgcttattttttattttttgacatttgccttggagattcctgtacttctatatccactggactaaaggcattaaaaatgcatgaaacaatgatgtcagaaagtaatttttaaaagcaacaatcctattttaactcaattaaaaatagaaaatcttaatgactgacaatatattctacagtataaaagtttctggaacaaaaaattataagatcacagtcaattttctcccactaggtaggatttaattcatttttataataattgtgcagcaggccaggtgcagtagcacacatctgttgttccacctactcaggaggctgaggcagaacgattgcttgaggctaggaactaaagctgcagtgtgctataatcacacccgttcaaaaaaaaagtccaggccgggcgcggcggctcacgcctgtaatcccagcactctgggaggccgaggcgggtggatcacgaggtcaggagatcgagaccatcctggctaacacggtgaaaccccgtccctactaaaaatacaaaaatttagccgggcgcggtggcgggcgcctgtagtcccagctactcaggaggctgaggcaggagaatggcgtgaacccgggaggcggagcttgcagtgagccgagatagcgccactgcagtcccgcctgggtggaagagccagactccgtctcaacaacaacaacaaaaaaagtccaaaaaagccctgcaaatagtggaactgatcagtaaggatcaacaggacttttaacttatctggccgggagaagagacatcttatgtatagatggttaaaagtgtggtaatccaattgaccacatattctagttaaatcacagattaccaatttctgaagaaatgtaataccacaaaagcacttcacatttaaactatgtcagataaaacaatttgtatttgacaacccagaagacacttaaaatcttggcagaccatcattgtgtcattgtggtgcagatataaagaagtgcatttgaaatgtgttctaatagtattttctttaggaatggaattcaaaaggaagcagtaagagcagaaatatcacaagagggtaaatgaaaagggaactgcactaacaaaaggagtcaggcactgacttttctcctgatgtgaccaaaaccccaagtactgagaactgctatattcagcatttcactttatatttttctccaggacattatattagtttcctgcaataaaatatttttaaaatgtcagtttgtctaaactgctggcctgtaaactatttctaatcaaaacctgaaattgtgtcacaacatggctgtattatgattccatgtcagaggaacgatatatacgtgcatctggtggtggcttccagttgttgctgtcagatgtttgtttgggaatgcattcagaagagcctatcaaggacttgagtaccaaacaagcatttccacaaaaaagcaggtaagaaagactacacttttcctcacatatgaccttaggtttagacaattctaggaaaatggtggtacattaactcaccagtcttgaccattttccctgatcctgtacagggagctgctgcagttacaaaagttaggtaggatcttggtaggtgtattcttccccatttgaacatcagaagtactgatcacataaacagcgaaccccacaactctatgattgttctttagaagacagtgccactgaaggcttttaaaaggttaactcactttactttttagtaatcttactggttagaattgatactccctccttgaaattctcacctttgttaatttttgcaacatcactttatgattcctctcctctttttctttagccacggctcaggcttctttcctaattcctctgggaaatgctgatattcccagggttctgtcactggccctctgctcattctatacctttcccatcatggacaagctcactcagatctacaactttgcctcagttattccaagtctgcaactccaacctcagagttccatctccagccataaaaatttttccaattacctactgaaaatatcccacatggacatttcagtaaactcagcaatgcagagaaaactgttagtcgtgactgctgacctgctgctctcctctatacacctgaaaactgcctactccctcgtgtccaggttaaatgctagggcacaagccagaaacctgagaatcatctgagatttctccctatcccctatctttttacattcaacaatcactaaatcatattaactgtacctcttttctgcatctgctttatatttccactgtgacacatttattttatgtttatatttcctagttaaacatgggctcttaagaattggcttttatagggaaaaaacaactattaatgttatttcttaaatgaaaaaaaaagtttaagtaaaataaatgaaaaaggcatcatgccaagaaaaagaccgacatttttaaatgagtaactgagctccttaaccttactgatttcaccatggatgggtgaaaacctcacaacagaccgacactagtctgaggacagcacaaggaaactatagctctgataaatgcaaatgtttcttttgtttccctgtctctttatgtggttatcttccagctgctctccatatgaggggtcagcaaactacaggccatggagcaaatccagtctgccttatagttttgtaaataaagttttaccggagctcagtcatgtatatttgcttgcctttttatgactgttttcatacttcaatggtagggttgagtaggaatgacagaccacatgaaaaagccctgtacagaaaatgcttgccaatccctgctttataccataaccagattgccctaatactcaaatctaatcatgtgactccccactccaatgagtccctacagtaaacattgctgtctccctacccaatagcgattccctgtttctcaatagagaaacacgcatctatttggatatttatcatgccaatagccctccccactccaaaagaagaaatgattattctaagctcatcatagtaattacatttgcttccccagtgcctgctttaggaatgagcatgtggtaggacccagccaataaaatgttacaggaagtcaactgcacccttctgagtcttctccctaactaaaagaaacatgtaaagatattgtcggtgagaccacgatgtttggagctgttgctaattagtcagccatgaaaacagacatgaacaaaacaccatgttatcactgaaccatcaaaacaactctggtccctactgttttagccactgttagttaggtcatctagtatttacagcccaaagcattccacctggtaaatttcccatggcctacaggaaaagttctactcatttctttcttttttctttttttcttttttttttttttttgagacagagtcttgctctgtcacccaggctggagtgcagtggtgcgatcttggctcactgcagcctctgcctccaaggttcaagtgattctcctgcctcagcctcctgagtagctgggaccataggcatgctccaccacgtctggctaatttttcatgtgtattcttagtagagacaggtttcaccatgttggccaggatggtctcaatctcctgaccttgtgatctgccctccttggcctcccaaaatgctgggattataggcataagccaccatgcccggcccgagatctactcatttctatagtattaaaaagtctgggcagggagtggtggctcacgtctgtaatcccagcacttgagaggccgaggtgggtggatcacttgaggtcaggagtttgagaccagcccgtcaaacatgccgaaaccctgtctctactgaaaatacaaaaatcagctgggcatggtggctcgcgcctgtaatcccagctacctgggaggctgaggcacgagaatcacttgaactcgggaggcggaggttgcagtgagccaagcgaacgccactgcactccagcctgggtgacagagtgagactttgtctcaaaaaaaagtctgtcatgagcttgccttaggtattcacttcattcccaaccattcacatctcatatgttttgcactggcaaaactgaactgctcataaaccctgcaaagttcactcaagcatcttacttttgcactcgctgctccttctgccacacacacaatcttctgcccacatcatccttctgcctctttacctagaaaagttctactcactcttcatgcttaccttaaatcttacccacttttttacagctttcattcctcaccacataaagtgtctggcacatatttaacataataaatgatcactatacggttccagagggcatctaacacagtagtaggcactgaataaataattcatcaaataattaaagtgacaatgataataacaagctcctgggttttgttggtttgttttttttcttttttgagacagggtctcactctgttacccagacacgagcgcagtggcatgatcatagctcactgtagcctcaaacagccaggctcaagcaatcctcccacctcagcctcccaagtagctggaagtacaggcacctggcaccatgcccagctaatgttttattgttttttaaaaaatttagtagagatgaggtcttgtcatgttgcctgggctggtctcgaacttctgggctcaagtgatcctcccatctcagcctcccaaagtgatgagattacaggcatgcaccactgtgctggccccaacagtatttttaaatgtctgtattctgtaacattagaaaaaaaaagcttagtactaaaagacatttgataattatttgttaagtggacaaatgaataaatgatttccttgaaaattctgttgaaaaaaacacagaaattaaatagagaaagctctgttctatcatgagcacctcaaagaccaaaactatgtctatttcatgtttgtctcccataacgtgcaaaacctaacttagagaagttctttgattaatatgtactaaattaaaggtgtcctcttacagttcagattgtccaatgcattaggcatcacatcttggaagcacagaagcattttttgttattgtgaaacatttttatactttcattataatttgttgagcctagagttgggctatttgaatatttattatgataatcttttggctaatggtaacagcatatcttgttctaacaaaattactgttaacatagcaattaaccagcaggtagaaaaacacatcttgttctaatgaagtaaatatacctcattcgatttcaaattgggggaaagtcaataatagtgacaccttgttggtttataagtatgtaacatgacctgttcttctcaacaaggaattgcttttctgacttctgcactcagaaggtctctttaaaaaataatttcccattagtattagtgcacattgggtatgtttggcagggttttgtttgtgtttttgtttttgtttttttctgagacagggtctcactctgtcatccaggttgtgatcatgatcacagctcactacagccttgactcccaggctcaagcgatcctcccatctcagtctcccaagtagctgggattacaggtgtgcaccaaaacacccagctaattttgtatttgtttttgtagagatgtggtctcactctgtcacccaggctggtctggaacttctggacacaagcgatcctcccacctaggcctcccaacttgctgggactgcaggtgtgggcagcacacctggccatttcacagttcttattgccatttgtttatggtgccagaaaggtattgctgagtttccagttttgaaactaatttcttttttttagtgacacaaatcactatgtaatatagttagcctttgaacaacacggatttgaactgcaggggtctacttatgagcagattttctcccacctctaccacctgagacagcgaagaccaatcttcctcttcctccttctccttagcctgctcaacttgaagactatgatgaagagttatagaatgatccacttgcatttaatgaacagtaagcgtattttttctgccttatgattttcttaacagtttatttccctagcttcctttattgtaagaatacagcatattaatacatataccataccaaacatatcttaattgactgtttatgttatcaataaggctgctggtcaacagttagctattagtagttacgttcttgggggagtcaaaagttatacacagatgtttgactgcagagggaatcaagcatccctaaattccacattgttaagggtcaattgtgattgatattcatttactaaacataagtcatttattttaaaaattaaatagaagttccaatttcataacaagtctaattcattataatgtgactataaagaaaacatacaacttactaactcaaaaatatctttttcttggccgggcgcggtggctcacgcctgtaatcccagcattttgggaggccaaggcggatggatcacgaggtcaggagatcgagaccatcctggctaacatggtgaaaccccgtctctactaaaaatacaaaaaattagccgggctgggtggcgggcgcctgtagtcccagctactctggaggctgaggcaagagaatggcatgaaccccagggggtggagcctgcagtgagccgagatcgcaccactgcactccagcctgggcgacagcgagactccatctcaaaaaaaaaaaaaaaaactttttcttatttatacaaaaatatcacataggattttagggaccataattaattttttttcagaccagattgtttgaaaaaataaatgacctacaattaactttttaaataattgtgacatctaacctaccaagaaatctaacctatcaagaaagaaataaagattttttaaaactgctctttcatgatcaaaacttctttactcttacttcttttttacctatggtaggaccaccaaaaataattcactatcagaagtcttacctggattgttattttgaggaagactttcaggtgtctgtttttccttatattcaggaactagttgctgaatgctatggataaaaatgtaataaatgaaattactattttaaaacaaatgaaaaataccaaatatattaaatttttggagtatttcaaacaatatcagagttaatatcagagcttttaattatcccatatacttcgatttgtgagttctaccaacttctctttaagcttctgaagaagaaaaaaagatgaagtactcatgaattgaagggagtatagctcagtaaattaactcacattagcttggcataatggaaagcatcctagctctattaccagcagctatttattctctgacaagttgcttctcttaggctcaatgtattcttctaaaaagcaaggattttcctgccttatttcactaggttgttaaaaagatttaacaagaaaacgttttgtaaatgctcagagaaacagtgaagcaatgaaataatttgttcttgagctttattgaggaaatggttttggaatcacaaataaaacccaatgtgtattttttccagaggttctaatattcaaatgttgcagttttccaaaactgttattaagttctagttttattagttctattctttgtggcttataatttggggcatcacagctagttcatagtttgtaactaaatttacttataaatatattatttcatcaaactagatagcaacactgtccactattactgagctcatcaatcacgccaaggggagaaagctaatagatgtcaagacctagcttggactactgttccatacagactcaaactctgaatcggcagatctttgttagaaggatgctcaatccccatgttcatctccaactgacatggaaaacaaaattctacttttttttttcagttccatgaaagacatgcaagttgacattctctcatttctgagatacatactgacaatatatttgcacacaacatcccacgtgttactcagctccattgatcaccttactgcatatttttgtagtgaaaaatcacaattttaatattaggtgatacccagtttgctttgactcacactgtctttggaagtagtcagcaaatagtcaaatgaacttctagtgactgcgcaaaatatggacttcaaaaatctgtgcatcatccttatgcaggcaggggccatgctgccattttgtttcaattttagtatatgtttgctgctgaagcaagttttgtttgtttgtttgttttagactgagtctcgctctgtcacccaggcttgagtgcagtggcgcgatctcggctcactgcaagctccgcctcccgggttcatgccattctcctgccttagcctcctgagtagctgggactacaggcgcccaccaccacgcccggctattttttttgtattttttagtagtgacggggtttcaccgtgttagccaggatgctctcaatcacctgacctcgtgatccgcccaccttagcctcccaaattgctgggattacaggcatgagccactgcaccctgccaaagctctcattttatacatggatattcatgagtcatggatgagacttggctctgttaaatccagctaacatacttgagactcagaattctggtgagggcttcctgtcacaaatctgggaaacgataatatgggacattccacgatctaagaaaagggtccggccgggcgcggtggctcacgcctgtaatcccagcactttgggaggccgaggcgggcggatcacgaggtcaggagatcgagaccatcccggctaaaacggtgaaaccccgtctctactaaaaatacaaaaaattagccgggcgtagtggcgggcgcctgtagtcccagctactcgggaggctgaggcaggagaatggcgtgaacccgggaggcggagcttgcagtgagccgagatcccgccactgcactccagcctgggcgacagagcgagactccgtctcaaaaaaaaaaaaaaaaaaaaaaagaaaagagtcctcagcatacagatctggtagcaatgaaaaaaggaaactcatctctttctgcaacattatttgaactgaaccccgagggcctaaaggataatttatcatgaaggtcttagctaagtctaggctgagacaaaagcataacaggcggggtttcaccatgttggtcaggctggtctcgaacttctgacctcgtgatctgccctcctcggcctcccaaagtgctgggattacaggcatgagccaccgagcccggccaacatgaagttcttaagggtggaaggaacctgagcgacagtagaatatgtctgctgtataatatgtattcagcttatgtttgatgaataaattgagaaaatggataaacacagttgggaagtgcaatatttttaaagaaaactcctgtaaagtagaccaacacttttgcaatagtaataatcctttatatttgatcccgtctcactaagaggcctgggcccctgacccctctgacgtttccccatcccgggtgccatggggcctccgggcaccagaaagccagtgtccccgacaggacggcgcacccgcatccttcacctggccattacctcttcttcctatccctcttgtccacgccagtgtctccaggagccaagacgtgctccaccccagggacgtcgcccgaccgggcagctctgtggagctcgccaagatcttccaggcggacgtcgtgctggggctggtctaaggcgccctcaccgtgcttgctctcgctgccgacgctatttttccaccagctgtaggagaagcccgaagaccactggtcccccgggtagcccaagtaccactggtcctcctggctcctgacgctacgggtcttcctcgtggcgtagactgccagcttcggagacccctcagcccctccccgcttttctccaccccaggaggccatcagtagcgagctactgcctcggccacaacctcccagcaggatagcccgcggtttccaatctgcgaaaggaggaccgccaagccagaaatgccaagccaagcgatcactgccacgccaagccaagcgaccaccgccaagccaagcagccaccgcaaagcctcgcgggtaaggccaagccaatccgttacagaccagtgcgcctgcccacctgtgacgtcacggaacctgtgacttcactgcaactgcagctccagcctcccagaaaaagactccttggcctgcaggtggcgctgcagctccagcctcccagaaaaagactccttggcctgcaggtggcgctgtagctccagcctcccagaaaaagactccttggcctgcaggtggtgctgcagctccagcgccaacctgggctggctggtcctccctcggaggtttcggggtggcggcgcctagcctgcctgtcatgagtgctgtttcacagactctatctcaaaaacaaaaccaaaaacaacaacaacaaaaaacggtgttggaagttctagctagtgcaaaaaggcacgttaaagaaataaatggcatgcagattggaaaggaagacataaaactgcctttatttgcagatgacatgattgcttagaaaatcccaaagtgtttgtttacatgcaggtttagctaagtctcaggatacaaagtcagcatacaaacgtcaattgctgtcccatataccgattgaacaattggatttggtaataagaaaaacaataccaattgcgacagcaccaaacaaaaaacaaaaaaaaaaacccgaaaaaaaaccgactaaggtctaaatctaaccagatatgtgcagaaggtagagctgtcagggtggttgagggcatgggctctggagctgcctgcctggccttgcctcttgcctttcctgctcataagccatgtgtctcagtttcctcctgcagagtgcatccacctcacaggacctctgtgagggtccaacaagtccatacatgaaaaatgcccagaatggtaaacagtaaatacatacagtaaatatgaaaaaaattgcattcacataatcaagcacaaattagctatttaagcacagctcatcaagtttacacttgcagagtaggcccagccatgcctcaggaattgctgtgtggtgacctccctccacagggacatgcagcacccagtcccgcagcggctgtcctggtgggcacgctggcactcagtgagcaacacccctcacagactacatggccttataaagacacagcagccctagggacacatgttatggccatttttatgacagcgatgtcacatatcatccttcacctaattccttttctggggagtcactcgcgcctgcaattgggctggctaagatgctctccttacacggtggctgaggaagaacactttctaataactggggaagactatagagcttcacttttaaagatttcatcatctcacatcagtcagaacggctattgataaaaagtcaaaaaataacagatgctgacaaggctgtggagaaaagggaatacacttttggtggaaatgtaaattagttcagctactgtggaaagcaatctggagatttctcaaagaacttaaaacagaactaccatttgactcagcaataccattactgggtatatatccagaagaaaagaaatcgttctaccaaaaacacatgcacacttatgttcatcacagtgctagtcacaatagcaaagacatgaaatcaacctaggtgtccatcaatagtagactggataaagggccgggcgcggtggctcatgcctgtaatcccagccctttgggaggcagaggcgagtgtatcacctgaggtcaggagttcgagaccagcctggtcaacagggtgaaaccccgtctctactaaaaaactacaaaaaattagctgggtgtggtggcgtgtgccagtaatcccggctactcgggaggctgaggcaggagaatctcttgaaaccagaaggcggaggttgcagtgtgctgagatcgtgccactgtactccagcctgggcaataagagcaaaactccatctcaaaaaaaaaaaaagaatacagagatctgacattcctttgagccaccactccaaaatggtttctcacctactcactccaacaaaattgctcttatcaaagcacaaaccatgttcacattgttaaattattaattaaagcataattccccagcctttgtcttaatttatgtatcagcagcatttgacacagtcaatctctccctcgtttttgcaaaacttctttgatagaattccagaacacttaacctactttccccaacatttttgataattactcctagtcattttttgctggtttcttctcatctttactacttttttaatgttagagaaccactaggctcaggacttggacttatctttcttatctttgctttcttactaatttttatgctttaattccctgatatttcatattacacctcaacattagactacacccaacaccgtctgacttcttcacttgggtatcatttaggaatctcaaaatgaatgtccacatggagccaccagtactccccaaacttggtcttccgctttctgtttagcggcaactcccattttataatttctcagctgaatattcttgatgtccccttttagttctctctatatctgtctggttttcattccctctctatctctccatcacatacacacacacacattttcagatctgacgtgtatggaaaaactaccagctttacctttaaagtgcaataattccaaatggtgttttcaaattcaccttccctccctcaccacttatacttccttcacaaggtcagtacttccctcacaaggtcaaaatctctactgcagagatttattggggagataatgagaactattatacattccttttttttttgagatggagtctcactgttgcccaggctggagtgcagagtggtataatctcggctctctgcaacctctgcctcctgggttcaagcaattctcctgcctcagcctccctagtagctgggattacaggcacgtgccaccacacttggctcatttttgtatttttagtagggacagtgtttcatcatgttggccaggctggtctgaccaacataatgaaacactgtccctactaaaaatacaaaattagccaggtgtggtggcgggcacctgtaatcccagctacttgggaggctgaggcaggagagttgcttgaacccaggaggcggaggttgtggtgagccgatatcgcgccattgcactctaggcagggcaaaaagagcaaaactccgtctcaaaaaaaaaaaatgactttttgatacatgtattaaatgtaagcgaataacagcataaaaaatgaacttttggggggatattatgggatgcaaacaagtactgagagcagtatgaggaataaaactctcatcctggcttggtgtgggcagaatctcacagtctgagaacagccccagtaagcggcagtggtagggcccctccgtataaaaactgttctcaaattgaagtctcagtaaaaaaaaatataaataaataaaaaataaataaatactaccaaacctcaacacaaaatgattgattcatcatttgatatacgctgtgaccttataacatgtacaattgtgttatcattctataaggtttatcatttgttaattttaaaaccagaataatttcaaacttgaaataagtcccttgaagaaataaatttcaaaatgcaaccccctatctatctatatctttatcaactatatctgtgttaggccattttttgtattgcaaaagcaaaggcatccttctacacattctaaattttatagaatcacacaaatattgacacaatggtgataggcgaaggtagacattaatattatttggaaaacagtttcatttatactattatgagcaaattattagaattggtctagagaaatatgaagtcacctagggaatgattgtatacacagtgcttttcactgatgaaaccatctcataatttctgttgtatatttttactacaatgataaattattggtttgagtttcgatgtgttcattaaatacattaaatataggttaatgttactgccttttgccaggttatacaaattgtttccattttgcgtttgttttgtttctcacttttattgttctaataggaatttattttaggtaaacacaagtatttcattagagaaattttgacatgtcccaggtttgttttttttgagacggagttttgctcttctcccccaggctagagtgcaatggcgcaatcttggctcatggcaacctccacctctcaggttcaagccattctcctgcctcagcctcccgaatagctgggattacaggcatgagccaccgtgcctggatgacatgtcccaggtttgtctgatctacaaaacatacacataaaatcagaggaaagaaaatgtgcaattgatgtcacacatcagggataccaataagggtcacagtgacatattttacctccaatttgtgggcaaaggtgccagtaaattctgataagaggcagcaatactttgtctacattcctattaaaaatcattaagttattttaaaagctgggaaatggcatggttgggaggatgtgtaatacaaaactgtaactcatgaaaattagctataaatctaggctatgacaggagcagcaagagtagatgtagcttttttaaaaactgtacttgaaaattatttcatcatcatctatagctcctttaaaataatatttagttggcatatgtcttaataaagggcagaagtacagtcaaaatattttttatataaggtaatatatgttaatacatatggtttattcttgttcattttgtttcaggctgtctcagaattgtgaaataggtaagtgaatgatagaaatattctcatagttaaaacttagaatgattatcccttcaaaaggtagaatattaccttactttcggtttcaaaggtaaagataatatatccatatacacttgaattttactttgaagagtagggaccaatatgtctccacacatattttattaatcatgggcattttgccagactgatgggatgcatctggtaaattcactctgtgtgtgtaagtgtgtgtgtgtgtgtcactgatttaccacatgtaatgattaaatgatacatgtaattacattatttatttatggtatttgaaaagaaagtactactaaggtaattattgactttcctaatatcagaccacttatgctcagagcaggacacagaacttacaaataatgcctattttgtaacccagtatttccttctcaaattttgaataacaatttgaataatttaaatgatattttaaatcctcattttaatgtaaccctttaataaacaaagaggtaatgataggccgggcatggttgctcacacctgtaaacccagcacattgggaggccaaggtggcagatcacctgaggtcacgagtttgagaccagcctggccaacatggcaaaaccccatctctactaaaaatacaaaaattaggtaggcgtggtggtgggcgcctgtaatcccagctactcgggaggctgaggcaggagaattgcttgaacccaggaggtggaggttgtagtgagttgagatcgtgccactgcactccaaccgggtgacagagcgagactgtgtctcaaaaaaaaaaaaaaagtgatgatataaatattttgtattatttaaaatagttcttttaaaatttccccttcacattaaatgcaaacataaacatttttgtaaaaatgaaaacattgcaaataattcaaagatcattttatcttctattccaagtgttgctcttcttaccaaaagtaactgtttccagcatgatttcacctctgagctcatgctcttaaccaccttattatcctgactttatgctttataaaacatgatgtggtatgctgtatgcattacttcagttgcctaatttaaaattatagagggtgggggacgatggctcacatttgtaatcccggcacttttggaggccaaggtgggcagatctcttgagctcaggaattggagatcagcctggacaccatggcgaaaccctgtctctataaaacaatctaaaaattagccgggcttggtggcacccagccgtagtcccaactccttgggaggctgagatgggagtatcactgcaacctgaaaggttgaggctgcagtgagccctgttaggaccaatgcactccagcctgggtgccagagtgggaccatgtcttaaaaaaataaaataatatgaagtaggtcttcctagtgttatcattttaaagataataaaatcaacatatagagatcataaaaaaaacacaagattatgtaatcccagctactcgggaggctgaggcaggagaatcacctgaacccgggaggcagaggttgccgtgaaccaagatcacgccattgcactccagcctgggtgacagagccagactctgtccaaaaaaaaaaagcaaaaaacaaacaaaaaaccccacaagattatttactggactacatcgaagagttcaaggaaaactgctaagttactgattttgtcactagttttcttttttctttacttttttatttttgagacagcatctcactctgtcatccaggctggagtgcagtggcgtgatctcaactcactgcaacctctgcctcccaggttcaagggattctcctgcctcagcctccagagtagctgggattacaggtggacaccatcaggcccggctaatttttgtatttttagtagaaacggagtttcaccatgttggtcaagtgggtctcgaactcctgacctcgtgatccacccacctcagcctcccaaagtgctgggattacagccaccaggcctggcctgtcactacttttctgtaatgtttggcataatatccaccttgacttatgttagggtaaaaaatgagggataattcaaaagtgtagagagatgaagtagcaggccccatgctttgacattaagaagaatggggttaagtgtgaggcttctgtgagttgtctgatctatccagataccagtgataatgacctagaggtacgttgtccaatagccacacatggctactacatttaaatttaaattaattacaataatataaaaatttggttagtcacactagctacctttcaacttctcaaaagccacatgtgggtagtggttagcacatttcgtagcatagagaacatttccaacatcacaaaaagcattggtgaatgcttgtctggacacttaagcacacacagaaatgtcaaattgggttaagatgctatcaaaagctaatgcttggacttgccattagacaaatacacgttatcaatgccctgctgatatgagaactgagaataaaatgtgtgttccgggtggactgtaattaaacagttgaatgcctgactacaaacatttaaatctaagttcatgtatttggtgatttggacctggaatgtatccttagttgggttgaagatggaaaacattcttctctttctgaccaacttattaaagatgtttgaatgatagcattacatatattatgcaaaatctttctcaaatgtcacaagatatatatagtataggaagcaactactatatgactttattagcattttcactgcttaataaatgcattttgtattacaaaattaataagtacccatactataattagggtattcctccaaaatattataaataataacactaaacaactacggaaatggaaagaaagggtcagcagtgtgtgttatggcatgaacatttgtttcccccagaatttatgtgctgaagatctaactctcagtgtgatgggatttggaaatagggcctttgaaggtaattaggtttacatgaggtcatgagagtggggtccttatgatggaattaatgcccttataagaagaggacagaaagcctgctcaagaaccaaatcagccattgtcttggtcacagacttcccagcctccagggctgtgaaaaataaatgtctgttgttgaaagcactgtttatagtattttgttataacagcctgagcagactaatacagcatgtaaatactatataatgacaacagaataaacaatgtggctataaaacagataacaaaagaatctgggaccattacatgctaaagtctgttacaactaaataaaaaaattaaaaaattaaaaatgcactttcattatgtcaaaagcaggtggaaaaaataaacaattatttaagagtgtttgtgtccaagcacatagtataaaatctctacacatcattaaatctttgtaataaagtagttttatgcccatctgtcataaataaatgaataaattataaacaattgaagcttagggaaaattatcagcattccagtttataattagtaggtctagaattaggaaaataatcctaaatatggtataagtgactgaagtatatttaatagaaaaatacattaaaatactgaagacaaagaatgttgctccataagctcataacgcagcaataatcaatttacataaattattccaaatattaatgaacatggagaaatcagtgaataacacactgaaaaatgaatgcctaggagatgaagtaaaacttcggtctttttggaatatttaataaattcctgctttaaactaatgataaaaaaaaaaggcaattccaaatatgacaaacgaaaagagacatacaaagagatatacgagactttttttatttcacaaaatggtacatgttaactcttaagttggaaaacacggatcactaagtgattttgcgaaacaaacaacaaaatcattaacacagaagtgataccaaaaatgcaaaggagtcttcccacctctgcacaaaacaacaaaagcacaaaagttgttaggctgagacatttcaaagtaaattattttattacctcaagaaaaagatcatataaaagctatcagttccaggaaagtttccaaaatgtttaatcaagtcagcataaaaatgataccaaaatctaggagaaaacgcgtaataaaacaaaatgctgcaaaacacagttcatcctcagttatatcagtaaaatatcctaaataaaatacttgccaatagaatgcaaaaacagagacagagtaagaaaggacaccgagcaggagcccacgaggttcacagtaagaaaacagcccagagagaaagcagcccgagggattcggccacgtgacgtgcggtggaccctgcggcagggaccggccaggctgcccgcccctcagcccctcagcccctcagccgcctcagcccctcagcccctcagcctcctcagcccctcagccgcctcagccgcctcagcccctcagcccctcagccgcccacgcctctgctcgctcacccgcccggctgccttaggggtcggcgctgcccagcgggctccagcgcagcctcctacccggcatcccaccggccgcgcctgccactgactcctggccgcccgctactactcgcgcgcggtgggcagggccagtccgggggagcggaccccgagaggcgccgcgggatggcaggcggtgtcttccaaacccaagcctccgagagccgcagccgggctcgggccgctgaccgacccggaggccccactctgtcccagccaaggcctcccggagccatcacccaccaggagtcccgggcgggggcaccacctgctccacgctgtcgcgggcttctgcgaggccatgatccgtgcccaacgccagcaaagggcagcttgtgcccgagagtgggggaaatgcatccttcccggggatctgaaaactccaggtcctcctgccaggagcccacggcctcagatggggcccaggaagcgcccgcgctggggaagcgccccctgcacctgagcccgaaattgtccctaacaaacccaacacccgcagggctgacgtttggactccggggtgcggtgtcgatgaaatgggcaccgcgtgctttccatgcaaaagacacgaagtctggagtttatggaattattgaaggaaagccgcgccagtgccaagagatcatggcccagagctggcagaactgatcagaccaatgctgagcaaaaggcctgaagaagaccatctggaggagcatcccgagggctttccccaaagcaccagatcgccttcctttccgaggccacaaaggcgagaacctccagaaatagcatgaaacacggtgacttggtgacatccaagcctgctgccaccgtggtttccgggaaggcagaatcaaggcatgaagtaatccacgccaaccacgctcctctgagggctgagcaagacatcgatagtgggtgaaggcaagtgtttgtcccaggagaggcccaggatggttgctcccttgaagtcacccgccagtctgaaggcccaggggacttgagcaataccaagaactggccacggtcctgcaacagcccaagggctgcctgccgaacataaggggtggctgggtcctccatgtgggcagctcatgcagtcagctcagcagctctccctgcctggaatggtctggaaagtgggggccaagcaggaagagccacctgggtgacccccctccctatctgctatgctcctgtggggatcaggcaaaggggaaattggatccttgccaggtttccagtgaagaagaggctcccccaggatgcaaactcatttcatgacaagtgcctggcccatcaggcacctcagcaacttgtcaaacctgtctcctacaaggaccatcctgtgtgggaccctgccaagctcctaggctttggggcaacaccaggaggggaaggtcatttcttcatctgagatgtggtgattgggtccatgtgagaccaggagtctgggcttcaacccttttctgccagcagcgagctgaagtcctgcctactacgtcctggtggacaaacgctgaattttcaagaagttgcaacacccccgagagacacccatgcctgtgaatatgggcacaggtaccaggaatatcgctgcccgggaatactcacagggttatatgcagaataggccacgaggatgtcacataattcctgctgcctagaaaagaggggaaagagggttttgttttttttgtgcagacgctgtcaatttcattttgtctacaaacccaaataacgaacacaattctgggttcagatgatccccccaaataagcagtgagctctttaggacacctgagtttttaggaattttttttcagtaaaatccacattccttgcaatgcaatgtcgtaggtgtacagttggatcagtgatcatttttcactctggttgattttttcttcccctttttctcagtttgcacacacagaagtccagtctttgggacgtgcagttccacgattctgaactaatgtgcagagcctcccgtccaccactgcagcccctcccagagcggctccttcatcttccaagtccctagcatgtcccctttgcaggcaacgtctcccggctctgtcagcccctggccatcctgatctgttctttgtctctatggtttgccctttcccagaatggccaatgaattggaatcccatggtggtagcctgttgggtctggcgtcattccctcagcaatactcatctaagatccacccatgttcctgcaggcattaggggttcgttccttttcctcactgagtcgcctctgtctgaagagtggaacccccttcctcccgagttcccatgttgaagatcatctccgtagcctccgggtgtgagttacaaccaatcaagcggtgaacgtcacatgcgggttttacttggacgtcagttttcaaatcagtgtggccaatatctgtcacactttggggatgtgtggtacgaggccactgagctttgtgagccacagcccatgtgacttacaaaatggctgtgccctgtcacgttcccaccagccatggatgagagtttccggggccccgcatcctttctagtattttgggcagtcagtgttgcctgggaaggctcccaagccctgccatcgtgccaccttcccatgggtccctatcctggatagttgtgggtcatggagagcacttttcaccatctgcatgactctttttttttctgccttccgtctccttgggagtcacctgggttctggccctacatgtcccagcccggcccagggcttagagccgggaggtgctcagtccatggtgccggctgctccctgggccaggagagcccttggtggctctgtcacctctcctgggtgaccctggcctctgccctggggacaacctcattcctctggattgccccatcttctctgggacccctgcaagccccattggccttacttgactccgaatctttgtatgaacatcatgtgtttctgcagggtgtggctgacatctagctggatgcagtggatgattctggaggacctcttgcccttctccttcatgacctgtagggcggggccaagaggaggaagcagcctcagaacagacaaaagactccctgccccaaacggcagtcatcccacagtcagcacttctggaaggaaggaaggaaggaaggtttccttctgcagaaagctcctttttgccttgtttctgacgccagggagggtcagcagagcccagcgcacctgtggtgcctgagttaccatctatgcccaggatgtgcatctgaccacagcccccacccccaacccaggctcaacgttccctccagctggagtcctgggatcctgatacagtctagcttgtttgtactgccctagctgagtgtgggagggacttaccttatatttgcctgggttctgggacttgattttgtcaatatctagcaaaagtgacaacgcccggccccgcaccgccaggggaatgactttgcatactctttgagacagctacagacagaagaacactccagtgagaaaggacatggggcaaccccgcagaggaaagctggcgaacaggcctgcagtcctatggcaaggatggggtaccacccacccactgagaggcacccacccaggccaaaaccatgggcgcctgtctcctggctctgcagagagcagtcacgggggccgcttcctccccatgttaccttcttggtgctcctatattttgtccagtctgcaagcatcttttgccacttgttggtacgtttactttccttgcgtctttgctgtcaaatgagccatgatggagttagcggagctgtcagtcgtctgacagtggcccgtggatgctgggtccagggctttggggccctgaagggacccaacctgaagaagccaggaaagggcaggccccaggggctgagaccctctgaaggaactggagctggtagtctggactggtgatgccaggacatgccatcctcaggccatagaggccccaagttttggtcaggtccagccttcagctggggtcttggttcaaacaggcagtggactctgagccaggactacagttcttggtttgggttttggtcaagccctcatgggaacagagtccagcaggaaaggccacccctcccagtgacagccgtggcccactcaccaccacacaggcccacaggccaccccctctgccttaccgatcacccgattcccagtccctgaagcagcctcccacgcagcaggcacaggctcttaccttcacctccagggcactgacgcggggcagctccatctcactgtaaggcaacccaggcagagctgaggacctgcccaggccaggagccatccctctccctgagagggccccagggaaggaccagcctacccccatccaccctaagtctcagcctgggacaaggcacagagaaggaaggcaagggcctccctgcggatctgacactagcaaggcactgggaccttggtgaagaagaagctcaaagctggccctgggtgggggggacacttgaagcccgtggggtgccttgggctgcacaacggtgctgctccacctgggctggaggtgacaccctctgtggacgctaagaaagtccagttctgagatgggatgggtgccacccagggtgggtggccaagccctgactaacagcagtacctcaggagtgaccacatcacccaccagagtccagggagcctggcctgagagctgcccagtgccctgaggatgcacctggagcccatcccatctgacactccccatgggccttgcaaggtctgacctcccagcgtgcacctgcctctccctgcatcctggccgctcaccctgcctgctccccatcttcccccatcctgcccagcccagacactatgaccctctctccggccactctggcccttctgtgacccttgtcctttcagaacctctgagtgagacctcccagatccgtccacacccacgccttggccactctctgactgggctgcccagcactgctggggagacactcagggcagcaaggatgaccaagggccctgcaggcagtggggctggccccagcactcctgctccagcctcagctggctctcagggtcattggccttcagccctcagcctcctcccagccactgcaaaaaccaggacatgggatgcttggctgtcctcccctactgtcctgcctgccctgacttggcccctccatccaccctgcgcagtgctgactgagccagcgggaagcagaatctctggagggccatgcagagccttggggactgaccaagttcccccactgaggggtcccaggtgagccactgttccctgcccaccccatctgttgtcctccccaggctgtcagctccacccgggtctggcttggttcaggtgccttccagaagtggcaggtctcaggggctcaccctgcccccctcccccaggctcctccctctctccatcctgtgagtcatgaggggccggcttcaggctgggctcccattaccaggcccaggtcccttccctgcaccactcccggggccttcagttgcatgctctgttgtccccctggcctcagtgagaagcccaggccagggccctgcccttcttcttccacaacctaccagggccagggccaaggccctcactgtccctatgccccttcctcatggctgagccccctgagccctcagagatctgctatacaactgcccagaggccaggccaggtgccctcttgccctgtggccacaaccctcagatctcaccaaggcaggccccaagggaacagggccagatcctcaggctgcccctcctctccagcttacttggagaccacagtgctgagagcccacgggcctgctctggtcccctctctgtccctaccccctctcctgagctccctaaatgtgtcatgaggctgtgccctaaccctgaccacaggctggaccgacaggagagcctgggaggagttctgaccctggagaggaggttggcccagccagggagacatgtcctgcttcagagaggcctttctaaaaacaaaacccatccctgaggtgagattggtggctggggtcggggggacagaggacttactgcacaatcccgaggttattggtgtattttctgacatcaacctgctcatgccccaagtccactgctgccccagctcggtgtccctgaaacccagaggaggccaggatagtgggggtaaggtgagaggtgtgggaggcccagggaggtgggcagcccctccccaccctgtgatcttaggaagcccaggaccctgtgaccagggcacagcgggagaggcgaggccctgcttcccttgagggagcggcccaacttgtacctgctcatacttagtaatgatgatattgccttgcccctgggcaggcaggttatccgggtcctcatccatctccatcctgcaagacaaagtcatcccaaggctctcccgcacccaagagctccagagaacagccaaaccacacgcactgcactcccagacacactccagtctggtgagccccattccactacccctcccagatgacaaggggccagactcagtggccccacccctgactggatctctgaagtcctgacctccaaccagtggtgggctccttcttgaggatttgagcacacggggacctgaacagagaggcctattgtccccgaacaccccaaggcagacacacacctgccctggcaggacaaacggcgtccacttgctgagggtgaagtccccacgatgggctgttctgggcacctggaggcaggtggagtcagggactggatgtctctataggatggttcagggaccaggaagataatcagttttccgtaggaagcaagacatctggtgactgctccgttctaccccaattctcactcactctggccagtgaagccccttcaggaacaacgccagccaagcagtttggtttggggaaaagatgatctgttgactccagagcagcctctgtgctcatggagaccccgtcgcaggtcgaggacggtggacaccacaattcccagctgtcaatacaggaggggactttgttttcctgggtcaccaagaaagaacaagagaacgctggggccttagtcctagagaacacctgggggaaccgtcccccccaggaatactcggggcaaacggaaggcaaggcctctagaggaccagacagagagaatgggacgctgcaggagggttccagtccccaagcctctttgaccaggagagacgattgtcaccctccaggcagccctccagggctccttcattttccacaactgcctgagggcagagggctccccaccccactcctagatgaaggaccccatgtgtccagtgggtcccacagcaaccatcagtgacctcctcctgtggggaccaagcttagggcacagacttggaccaagaatttcaccctccaccccacccacaggggctctgtcccagtggctcttccaggaccagaccctgcctcattgaattccagaactcaaggaagatttggaatctagggtagagaggcctcagcggtcaaagctcaagtccagcatggcaaagggtagggctgagtgcacggcccgggtcacatctgggtctctgggccagtcaccgcctctctgactctacacatctcacctgtggaatggctacatttggggacagcacccatcgccacagagtctctgtgaggacaaaggagaggatggtccacgccgtcagtgcagaacatgtacccggtgagtgctcaggggtgaccctcgtcggcatctgcccagaggtcactcacctgagtctgctcaggctgctgtgtctctcgcttagaaaagtcgttcatgcaccacagaaccagacacctgtgtgcgtcttatgtgcaagtgctgcacaacacagaggtgagtgggtgggcaggtgggcggtcactcagcaccagtgacattttgaggtcatggcacccatcataatgggccattgcccaggtcaagagggcccagagtcggtgtcctccagcccctaaggtgtcaaaatgtgtttgtgcaggtgagcatgtatgtttatgtgggtgaacatgtgtgtgcacgagtagcgtctctggccagggctggctgtcccacttacatgtgcacccaagtgctcatcaagtcttaatcagcgtcaccttcccttgaggcctgtggcaagcatcagagcatccatgggtcctccccaacctcagaactccccacacggggcagtcctgaagatgcagatgggggctaggggttagagggcacaggacagggcccctcattagggggaactcagctagactgtaaaatgctgggtgtgagtggcaaggtcggattccacacattttttcacctcctcctcccagtagccttccagggtgccatgactcatttctgctatggacggaggcaaggaggctctaaggacaaaccccgtgcctgaggtcaccaagcaaccatctggccaggcccccactaaccagacccctgccggccaggctttcactgaccgttttcccagtgaccaggccttctgactaggtcctcactgatcaggcccctgatgaccaggctccaactgaccatgtccccactgaccagtttttcactgactaagccccagtggccaagcctctgctgaccaggcccctgatgaccaattccccactgaccatgtcctcgctgaccagtcccccagtgaccaggccttcctgaccaggtccccactgtccaagtcctccctgcccaggccccagagcagcagtgttcaaggtcctctaccacaactgcccacaggcagagggctccctactcccagacaagggaccccatgtgtccagtgggtcccacggagaccctcagtgaccgcacgtgaagtctgagttggtgagacctcctcctgcggacacccagcttagggcacagacttggaccgagcaccacctccctccaccacacccataggagttccatcccagtagctctttcagggccagactctgccccatcaggggccagaaaaccctgggcagatttggaatctagggccatagagaccagggcatgcacagggcagggctgagagcacagcccaggatcacatctgggtctcttggccagtcacctcctctctgaccctagacatctcacttgtggaatgggtacattcggggacagcacccaccccacagagtccaccaggtcagtgcagaacaggcacctggtgagtgctcagggatgaccctcctcggcacctgcccagaggctagccctgcccaccaggtaatgactgtacccaggtcagcagggaaggaacagagcaggtcacactcacctgagtcagttgagtcagttgtgtctctcacttagcaaaacttccttttctcagaaccagacacctctatgtcttatctctaagagctccagacatagagacggcaagcggacaggtgggcgagtgctcagcaccagtgacattgtgaggtcatgacacccatcacaatgggcccctgcctgggtcagccgggaccagagtcagcaccctccaccccttgaagtgtcaacgtgcgtgtgtgcagtgtttgtgcatgtgagcatgcacgtgtatgtgggtgaacacatgtgtgcatgcgtttgtcactgctctggctaggcccagctgccccactcatatgtgcacccaggacactgggtcacccttgtcactctctcccccctcgggacccatggccatcatcagagcatccacaggtgctccctaaactcagacctccccatccagggcattcctgggattgcagatggaagatagggggcagaaggttgagggttgggggcaaaaggcaaagggcaggtcccctccctagcaggggactcatctaggctgtaaagtgctagatctgtttggcagggctggattccacacacctgctcacctcctcttcccagcagccctccggagtgccatgactcgttcccactacagatggcggcaaggaggctccaaggacaaaccctgcctgaagtcacctagctgccacctggccaggcttctgccagccagacccccactgaccaggcccccactgaccaggccttcactgaccacgttcccactgaccccactgagcagaaccctgagccgcggtgatcaatgtcccctgccaatgacccccctcagtccacagacctcccctccccacatcagcacccacaggccatcccctgggggtcttctcgggtcaaggcccccactccaggacacagggagggacagtcggcctcaggctctgggtgcccagcttcatgctcgcccccaaaagccctctgcgctcaaccttaaagggggcagtgaggtggcctggcactgcctggacatgatgtctcggcctattcctgagccgcagagccagaggaacggggggacgtttgtcagaccaggcaccccgttttgctgggtctcccagggttcttcctgcggaggctggatccagaggcgcagcaccgaggctgcagggtgaccggcccagaagcctcgagactgggctggggaccacatgagaactgtccccagatggccagaagaccctttgctaatttcctggtagctcatttcccaccagctacccttgccccaccaggaatccccttctggcagagtcaatgaggagaggaagatggtcacagaatccatggaaagaaagaaaacaaaatgacaatggaacatcatctatttcctgtccatctgaaaggaaagcctaaggaagcctattgggttccatcaccctgagggccccgaggatggcatcacacagtgcaatacccaatggcaggggcggtgctccatccctgcagacgtcatcgagggcacacctggggtcgtctagggtcatggacctggccacagagcagaaactgggtcaacaggagtgcacacacgcacacaggtgcacactcacacactggaataaaacgaatttcgtagcaagtggtcacgtgcgcgtgggagcgcgcgcgcacacacacacacacacacacacacacacacaccacttgttgctgatctgctgacttatctcactgccatgaaacagcagctaagcctgtaattgctctgcctttccttggatttttcctttagtttctctgactgctgggttactggcctgtgtttagcttcatgaacatgggtttcactttatttttatggggttccagctcttgctcatggaatccctccctgcctgttctgcagtcttcccttgtttactgcctgtggacttcaagtatcagacacagagaaagatttgtagatactgtttactcagcccccacaatttccatagcaggtctcttaattcccatcacctccagggagggtcattgctgggatcctaggaatcaagtgccttgtcttgatggccacagtggtaaccataatagtcaggttttccctctgtgcaattctggaacataaaaatcttctctggtaacaagactacagaaagcaatgaaagcaacactaaactgggagtttgctggcctgtgtttctaagaaatttaatgtttttacataaacaatgaagaagaaatgacttttctaaagttcctgtcatttatgccatggattggactcttctgtgaaagcagtttcattgatggatgtggataattagcttaacttcaagtaaaagattagagagcaaattgtaaacataactgtgcttttttacactcaaatgacattaatcagacagttttggatctctagaaatatatattagaacatgtaagttctatattgaaatgcgcaagtttggaatccttcaggtgacttatttttcatcaactagaaataatattaaaattgcaaagatttattatgttttatattatttgtcctaatggaaaaaggaattcaaatatgtttattaaagtataatatacacaggaatcctattattctactactcagtgatttatcacaaagaggacacatgcttggagctaccacacagtccaagaaaatgaaataaaaataacaatctggaaatccctctcctgaaggtctgctccctaaccactgcccacctgtcttgtcaaagcaaagagtcacctggtttttagcagccccaattagtgttgtctgtttcataaatggatgcatggagggccattcagtaggaatggttttgtgtgtggcttctttggcccagcattacatttgtgacactccttcaagtggtttcatgaagcagttcttttttttttttttttttcgagatggagtttcgctctgtcggccaggctggagtgcagtgatgcgatctcggctcactgcaagctctgcctcccaggttcacaccattctcctgcctcagcctcccgagtagctgggacttacaggcgcttgccaccatgcccagctaatttttttgtatttgtagcagagatgaggtttcactgtgttagccaggatggtctcaatctcctgacctagtgatccgtccccctcagcctcccaaagtgctgggattacaggcgtgagccaccgtgcccggcccaagcagttcatttcttttccctgctcagtggtgctctgcatgaatatggcacatctaccaattctactgttgatggacattggtttgtttctaatttgggactacaagcaataaagccactatgaacattcttgttaatttcttttggtacacatgtatagatattttagttaagtacagccctacaaataaaatagcttggtcatggtaactgcatatgttcaaatgcaacgcatgtcactaaaaatgtcagctaggaggaaaagctcaagagctctattgtacaacatgttgactacagttaataacaatgtggtaatacttgaaattgttgagacagcagattttaaatgttctcaccacaaaaaaaaaaagataagtatctgaggtaactgatatgctaggtagcttgatttagccattctacaatgtctgtctgttgctatacatatatatacacagatttagctattctacaatgtgtgtgtgtgtgtatgtaaaatgtggtatagcacaaatacatacaatttatcaattaaattttaattccaaagatttttttgactaatatataacccaaccacaagtttgagagttctaattagatgtcctttccaacacctgattttgtcagtcttccttttatatattctggttagtggataatgttatttcgttttcatttattttggtcttctgattattaaaaggcctgataccactttcataaatgtttattgaaaatgtatataatcaggctgggcacggtggctcatgcttgtaatcccagtactttgggaggccgaggtgggcggatctcttgaggtccggagttcgagaccagcctggctaacatgatgaaaccccgtctctactaaaaatacaaaaaaaaattagctcgccatggtggcaggcgcctgtaatcccagctactcgggaggttgaggtgggagaattgctggaaaccgggaggcagatgttgcagtgagccaagaacgtgccactgcactcaagcgcgggggacaagagcgaaactcgcgtggtggtgcgtacgcctgtaatcccagctactcaggaggctgaggcaggagaatcgcttgaacccgggaggcagaggttgcagtgagccgagattgcaccattgcactccagcctgtgcttcaagagcaaaactccgtctcaaaaaaacaacaaaaaaagaaaatgtatataatcatattttcaggggtctatgcaattttttatactttttccaatgtggttatcaatctttctaaatgatcttcgagaagtttttaaaaataaattcttgacataaatttttgggattttgtcagttaaaggtggaaatatcttctctttaagaaagagcttggctgggcgtggtggctcacgcctgtaatcccagcattttgggaggccgaggcgggctgatcacgaggtcagatggagaccatcgtggctaacaaggtgaaactccatctctactaaaaactacaaaaaaaattagccgggcgtggtggcgggcgcctgtagacccagctacaggctgagacaggaggcaggagaggaggctgagacaggagaatgacgtgagcccgggaggcggagcttgcagtgagcggagatcgcactccagcctgggcgacagagccagactcagtctcaaaaaaaaaaaaaaaaaagaaagaaagaaagaaaaggaaaaaacaaagagcttattaggccgggcacggtggctcacgcctgtaatcctagcactgtgggaggccgaggccggcggatcacgagggcaggagattgagaccatcctggctaacatggtgaaaccctgtctctactaaaaatacaaaaaatcagccgggcgtggtggcgggcgcctgtaatcgcagctactagggaggctgaggcaggagaatcgcttgaacccaggagttggaggttgcagtgagccgagatggcgccactgcactccagcctggactacagagcaagactccgtctcaaaaaaaaaaataaaataaataaaataaaataaaaagagcttattaatggataatcattggagatgttaagttttaggtaagatagaaaaaagggtcttttaacatagttgtattatatatatttttgccttgtattttcatgttacagaatgggtctaactttgggtcaatatatgtgttcacttaatttttttctaaatttggaagtaacctgaaatttacacaaagactacaatagaattacaaaggatagccaggttcctcttagactgacacacagttaacgtttaatcctgcttgttttatcatttgctctttctatatacaaatttttcttgaatcatttcaatttcatacattactcttctttacctctaaatacttccaatatgcatttctcaataatgaggatattattaatactttacacaaccatgatacagttatcaactgcagtaaatttaacatcaatacattacttttatctattctactgcttgtattccagttttgaaaaattgaaccaacaatgtctttaggagattttctctcacacaagacctagtcaaagatcctgtattgtatttagttgtcatgatgctttagtctcttttaatttggaagttattcagcttttccttgtcttatgtgacattaatatttttgaaggcccgaacggagcggggcctgctgagcgggcgcggcaccagccgccgcaacccaaagccccgggcttcctgcagccaccgccgctgcgccagcccaggacgaccccgccgccaggggcccagtgcgaggtccccgccagcccccagcggccttccccgcccggggcgctcccagagcaaacgaggtccctgagagctccacctagttcacaggataaaatcccacagcagaactcggagtcagcaatggctaagccccaggtggttgtagctcctgtattaaggtctaagctgtctgtgaatgcccctgaattttacccttcaggttattcctccagttacacagaatcctatgaggttggttgtgaggattatcctactccatcagaatatgttcaggattttttgaatcatcttacagagcagcctggcagttttgaaactgaaattgaacagtttgcagagaccctgaatggttgcgttacaacagatgatgctttgcaagaacttgcggaactcatctatcaacaggccacgtctatcccaaatttctcttatatgggagctcgcctgtgtaattacctgtcccatcatctgacaattagcccacagagtggcaacttccgccaattgctacttcaaagatgtcggactgaatatgaagttaaagatcaagctgcaaaaggggatgaagttactcgaaaacgatttcatgcatttgtattctttctgggagaactttatcttaacctggagatcaagggaacaaatggacaggttacaagagcagatattcttcaggttggtcttcgagaattgctgaatgccctgttttctaatcctatggatgacaatttaatttgtgcagtaaaattgttaaaattgacaggatcagttttggaagatgcttggaaggaaaaaggaaagatggatatggaagaaattattcagagaattgaaaacgttgtcctagatgcaaactgcagtagagatgtaaaacagatgctcttgaagcttgtagaactccggtcaagtaactggggtagagtccatgcaacttcaacatatagagaagcaacaccagaaaatgatcctaactactttatgaatgaaccaacattttatacatctgatggtgttcctttcactgcagctgatccagattaccaagagaaataccaagaattacttgaaagagaggacttttttccagattatgaagaaaatggaacagatttatccggggctggtgatccatacttggatgatattgatgatgagatggacccagagatagaagaagcttatgaaaagttttgtttggaatcagagcgtaagcgaaaacagtaaagttaaatttcagcatatcagttttataaagcagtttaggtatggtgatttagcagaacacaggagagcaagaaaatgtgtcacatctataccaaattaaggatgttgagttatgttactaatgtatgcaactttaattttgtttaacactatctgccaaaataaactttattccctataacttaaaatgtgtatatatatatatatatatatatatatatatatatatatgtgtgtatatatatatatataatagtttattatgtacagttaattctactgttttggctgcaataaaatcgattttgaaataaatgaaatgttgaaaattttgctagttggttagatgcttatcctttaaattctacttttcttgaggtgaaaaagtcttcctctggaaatacatatcactgcaaaaatgtagcatccttttttaggtaggagtattatagctttcattttagtttgacatttagtgtcccaatgaattgaatttcaaatatgaatcataatcttgaaaatctttagcactaaagtcttggaatatatcaacaactgatttacatatgcagatgctatttgataccaagggctttttaaatgtcatgggggggaaatcccaacttggtgaactcccagctaaacagccaagacttcactgaagatttattccaattctagaattgttcttttttatttttattttttcaactgactaacttcattaccttaaagcctagaacattattctgctttatttatatggctttctcacttttattttgtagcatgggttgcatcgacttttttactagagaattttactagatatttgtcattcaagttttcatctgctttataattgatacaccttgagggtcacttttctaatacttttactataatgtggtaccacctcagccctaataaataatatttttacctaatgtcaaatctttttccagctaactaaaaactatgtacaaaaggattgcttgtaaatatgcatgtaaatagttctgttaataacccactgttttacatttggtacatctgtgtctgctaatacagttagctttctcacttttctgcttgtttgttcagtctgaattaaaattagactttgaaaataaagcttaaatagttctgtttcctctaaaaaaaatatttttgaagaatgcagtccttttaatagtcctcattttggagtttgtcaaatatttcttcatgattagattcctgttatgcattcccagccagaatagtacacacattatgctgtgtccttctcatggtatcacatctgaggcacagaatggccatgtgctgcttactcatattaattttgatcatgtaatcaaagtttttcccagttcttccactatataattattttttgccttgcaattgctaatcataacaagcaatctctggaaaagatacttcaattctatgcaaatatcctgttcctcatcaaaatttccccttagatttagcatccattgattcttgcttgaatcagtctttactgttatggctacaaaatgatagttttccagctccaacattcccttcgcatttacccattggcataggatattctgcggtaagcaagtgtcctctgttatcgctcatttatttacttattatcaatgtgaactcatggactactacttcttcaatggtttgcaattcatcattttcttgttttgctgctcaaattgttctggatttagtcagtgagggctacttcctgtgtctttgtgacctaccctcatcatttttttgagtgctacttttttttttttctggaataagatgttccaggatcttcttggagtttccttccctcagacctgcaatcagccatttttctgaggagccttagttccttttagcagagaacggtatcagaaaccaagatctgggctcattgcaactgagatgtcattgcttttagcccgtttcagtagaaagagcatggaaatgtgtgtgctaagaaggtgtaaaagggatgtgtggctgcaggaggtcattttatgtgtgtttgtgagttttgctcatctgctaagttgcctgtctaatgtagagagttctgattatctacatcccagttaatttctttggttagcaaatttgtgattaatatgagtggctgggaggctgtatgaaaacaatagtggcaacgaaactgtgcagaaaagttaacatagcaagtccgagcctgctatctttagaaagacttgcctacaaggttggccacaggcgggcatctgggaagtataactttgggatcgttcccgctaattccagaattaaagtggatcactgctcctaaactgtctgtaaaaacaatgaagcttatgctgaacacctgctttccttctgaagtctggagttttggtacatgctagacagagactgcctatgtgactagcacccagtacaaaccttgggatttgaatctctactgagcttccctgatagatcacatttcacacatgctgtcacaactccttgctgggggaaatgagcaagtcttgtgtgacttcactgggagaggactcggggaagcttgttccttgtttcctccagaccttgccgccccatgagccttttctctttactggttttgctgtgtgtccttttactataataaaccacagccaagaaaatgacaacatgctgagtcctgggaatccttctagtgaatcattgaacctgagggtggtcttggggatccctaaacatgtagaaagaaaatgttatgtttttgtttatcaaaagaaaacaggactatttttctcttagagtgaaatgtgtggttgttgcagaatgcaaaagatagttaaagcataaaactggagaggatgctgtaagttttggaaggtttgggggaaagtgaactttacttgtgctttataatagctgcaaattctgaaaagaagaaataaaatgtattaaaattttgacaaaagttggcttgattttgatgagttcattaaaatctatgaaatctttaattcaaaatattatatttaaaaagattaaacttcggttatctttgcttaaatgatagtttgttcaacaagagaaagggaaagatcattctttaccttctgtgtaatctgcccaaatagtagaaattgtctctcatcagaactacagttttgtgctttgttctgtgttatgcttttcattatacatacatatatatatatatatatatatatatatatatatatatatatatatatatatgaacaaagccaaaacagacccttatcttggagcttatgatatggcactcataaacaggaaaatgtaagaaatacttgggtttgtttggtatgtcctatagttattaattagttcaaaatgattgtaagagctgctctgtttatgggaagaggtgtcagaccaaagagaagggaaaccttccctagtttaattttgtatagatatgttactaaaacaaatgtttcagaaactgtatacttacttatgtttggaaggccctggagatgtccacactgtatataatgcattcttactctcaggggaacactgatcaactcctctttgaaataatcatgtgttatactccaataaaggattttactctccttcattctgatagttattataataaattatgaagtgttaattataaattcagatggaattaaatggtgctgagatagcaagagaatgagctgatgacatcttctgaatatctgaatccagtcatatctgaagctagatctcaccatgggtttttaaaaattacagtcctgggccgggcgtggtggctcacgcctgtaatcccagcactttgggaggcttaggcgggtggatcacgaggtcaggagatcgagaccatcctggctagcacagtgaaaccccatctctactaaaaatgcaaaaaatcagccgggcgtggtggcgggcgcctgtagtcacagctacttgggaggctgaggcaggagaatagcattaacctgggaggtggagcttgcagtgagccgagatcgcgccactgcactccagcctgggcgacagagagagactctgcctcaaaaaaaaaaaaaaaaaattacagtcctggataacccagcaggtttgagtcactacaacatgagatgcataggtcacaagactgggaattgaatcaaccatacataaaactatgtttttgatatggcaaaagtaatatttatggtggtggctgccctataccatcttgggtccctaaatgactactgatgagcaaagactccctgccaggccacaaaggacaggtagcacaagttagcattaagaaatggcaccctggtgagaggtccatgctttttgtatactagagcctggtctcaaagaatagaaaattatcatcaaaatataactcagcaatgtgcaacaaagccctttcacatatataatttcacataaccctcacagaaactctatgaaatcaatgttggaaatacttccttagttggtttttttgttttttttttttttttgagatggagtctcgctgtgtcacccaggctggagtgcagtggcacgatcttggctcactgcaagcaagctctgcctcccaggttcacgtcattctcctgcctcagcctcccgagtagctgggactacaggcgccagccaccatgcctggctaatttttttgttatttttagtagagacggggtttcaccgtgttgccaggatggtctcaatctcctgacctcgtgatctgtccgccttggcctcccaaagtgctgagattacaggcatgagctactgcacccaactttcttaggttttaaacttctgtcaatgttatcactgtttgatctttgaaaaactgctcttgtggggggaatagttggggagcaggaggccagattgtcttattcatgctgaagttaacttccaatagcagtgtttgttttacctgcacagcatctttggatttatttgagggaagcaccctgtccccacccacagtgcaagttgcatcaatgggatggactccaccctctcttcctccagggttttacacagactcaagcctggtcgatgagaggaccccatttccagggtggtattataaaaggttcagtgatcagcatgactcaagcaaagtggagaagtagcctcagggattttgctggagctatttggaaagaggtactttccttggaattgtgaatgccaagaactgtaatataacttccaagtgccagtaggctatttgtcgctgcaagagactaagaaaagcacatccaacagagaggaagccagagcagagatggaggcggacagtcctcgatctattaatagcaaagcatttatctctagtttgactccatggattgccccagatatgtgaactttgctaacatgatgattacgtgtttcatgaattggtgggagtgggagggaggtgaagcatgcaccttttttgtatagtccactcaatctaagggatttataaacagaggttacatcatgaaaaaaataaaaaacaattcagtaaaaacatctaattttttgaggtttataagtggaaactacacagtaggaccagatgccacattttatatttattactacagggaatagccttctaccttgtcaataaaacttatggagagggacagctcacatggctacgggtcccaagactgcctagttggggcccagaaagaattacacaaggaagggaagaaagcaggcttccaacttgagtcatcttctgataaacacattgtttttttttttgagacggagtcttggtctgtcatcaggctggagtgcagtgactcaatctcggctcactgcaacctgcatctcctgggttcaagcgattctcctgcctcagcctccctagtagccaccacacccagctaatttttgtatttttagtagagacagggtttcaccatgttggccaggatggtctcgatctcttgacctcatgatccacccgcctcagcctcccaaagtgctgggattacaggcgtgagccaccgcgcccaaccgataaacacatatttttaaaagtgagaacacatctaagaaaataaaaactatgacagattttcaatagataattgatctagttaattgccaatcaatttgaatatttagtattcttacattatcacttttatacttttgggtgatattacattgtcttcccccaaaccagatataattgaaaacttacacaaaatcagatttttatgacattttacctattttttttttttgggggatggagtttcgctcttgttgtccaggctggagtgcaatggcactatcttggctcactgcaacctctgcctcccgggttcaagtgattctcctgactcagcctccgagtagctgggattacagccatgcatcaccatgcctggctaattttgtatttttagtagagatggggtttctccatgttggtcaggctggtctcgagctcctgacctcaggtgatctgcctccctcagcctcccaaagtgctgggattacaggcttaagccaccgcacctggcccattttgcctaattttaactgtgctttttatacgaagttattccctccctttcaccccaattagccctactgagtagtgcctatacctggcctggggactcagtactacttgttagaaactatcttcctctactccttaaccttcttgcagatacttgggttgctgacggtatctcccatcccatctctccagaagttgtgaagccagatgaccagctagaaatgggattggtatcctgaatgatatggagatattttttggttggtccttcattacatcttaaaatatgctttaaaaaaggaagaatttaaaagaaatttacaaaagtttctgacaaaacatatacaaacatctttattgacaagtgagccaataagggcacatttagtttacagataaccaaaaacatttgaaatgcataacattaaaatttccaagattcatgttgcagtacaaacatgtggcaggttaaacatcaggcataaaaaggacaaatactgaaacgcaaagggccagagatcccaagtcgcttaacactatttaaaatgttattcaactgcaaacttcagcctctggaaccatcccagatagctactggttaagtgatacgaagtaggaaaaaagaaggttctggaaggtctcaaggaggctgtgcagaaaacagcaccagatggaagcaagagcagaaagaagtcacgtcccatctttatgacaagccacagaacaagatggtcacagttcttcatgggtaaacaaaagatgtggaagacacagccaaccttaagtaacttctactgacggatgctctggcacttctctatgtagagaaggagagagaaagagagcaccaagcaggagtgggggactctatatttattgtctgccagttcttttgtatgcattgtcttatttaatccttatgacaacctcatgagaagccaatgatttattccctttgttgaaacctaatacagataaagaaactgagactcagagtagggagtttttccaaggtcacatgactgcttagtggggatggcagaattcaaactcaactttggaaagcccatgttggtcttctttccttagtcaaattttggccctcaaatgaatttcttttcactcaagaatttggcaagtttcaataacttgaattctcctgacaatatatagtaacatcctagaggtaggagtattttgatgcatcatttcccacctcttttatttttctgtccccagttatctctcagtaagttcaacttttccattccacctactttctctgactggtttaaaccctttatctgacttcttgatgaatgctctggaacaggggccaagaaaatattttctgtaaagagccaaacagtaaatattttaggctttcagggacatagaacctactatgggctatatccccatcaaagtcatataatgaaacttaattgatggtattatgaaatggggccttttggaggtgattaggtcgtgagggtggagcgctcatgaatgggattagtgcccttataagggcctgaagataccagagctctccccttctaccatgtgaagacacagtgaaaggtgctttctattaaccaagaagcagaccttccctagaccctaaatatgttgacaccttgatcttggacttcccagcctccaaaactgtgagaagtaagtttctgttgcttataagctgctctgtttgtgatattaaagcccagaggcacaacctccgctgcagctactcagttctgacactggacacaaaggcagtcaaggacaacatgtaaatgagtaagtgtggctgagttccaataaaattttcttctgagaaacaggtggtgggccagagttggtccatgagtccaggccacagtttgtcaactcctgctctaaaccattagtactaaatactaagatgataaaagaggtgagttccttttcctgtgttttctttcttttttcttttttttttttttttgagtaatgatacagtttagatctgtatccccacccaaatctcatgtttaattgtaatccccaatgtgggaggtggggcctggtgcaaggtgactggaccacgcaggtagtttctcatgaatgatttagcactgtccccctactgctgtctcgtgatagagttctcatgagatttggttgcataaaaagtgtgtagcacctcccctctctcttttcctcttgctctagccctgtgaagatacctgctctggctttgccttttgccatgagtaaaagctccctgagacctccccagtcatacttcctgtacagcccatggaaccatgagccaattaaaccttttttctttataagttacccagtctcaggcatttctttatagcagtgtgagattgaaccgatacagataacaataacaaaaagtaggtaaatatgaaggccagagaaatggcaacttcttcatgaagggaagctgcttatcctcaagcaagtcagttgaggactatcctgtgagctattttccgtaccttgttttccactcatacagggaagtatgccctggtgtctcacagttgcttcagttcttctttactgggaccctaaatataataacacactgaaccactcaacttctcagaccttcaatatccctggggctttttctcaaatggacacagcatagctttcagaaagctgaataatgtagacaaaagaagtctccctcaccctttgattatggaaaaccaaagatttattcagtgccaaggataagaaaggaaggacttgatcaacaaccactgttaagattttgacccattcactacttcacgtgaactcccagggaaatggaaaatgaaagaaggtctccgcggtagagggataacaatgacataaatcaatgatgatgccaggcatggtggctcacgcctgtaatcccagcactttgggaggccgaggcaggcagatcacgaggtcaggagatcaagaccatcctggctaacatggtgaaaccccatctctactaaaaatacaaaaaaaattagccaggcgtactggcaggtgcctgtagtcccagctactcaggaggctgagacaagagaatggcatgaacctgggaggtggaggttgcagtgagctgagatcacgccactgcactccagcccgggcaacagagcgagactctgtctcaaaaaaaaaaaaaaaaaaaaatcaatgatgtacataatccatgtgaacataaattagaattgtctgtaaatattatacatcctagttatggtcatcaaaatagacagcagcttgttgagggaggaagggaatgctaaggactttgaacccagcatttttggtttttaaggctaatataaaagaaatgacactctagatgaattataccatatgtgtatctagatctcaaggagtaataaataacaacattgtgtcttcctgatgataaggatgtaagccctcagcctaacctacccaataagaatttccttacaaagtgagaggcttacaacaaagctctgacataaacaagagaggggaaaactggatttcacaatgtttgtactgctacccactctcagggacttcttgaatttccacagatagctatttgggaggttggagattaaaattttgaaatcgctggctagatttcataattatcaaattaacggacataaagaacctgcctatggctcaaaactatgtattacacaaatgaaattagatgcatatagaattggtcctcacatgcatattatggatgggccttccacctaaacactcaagtatttaatatagtgataaaaccaacttacatttcttcacattcagtaatttttcagggttgctcttcagtgtgaactctttgatgtctgatgagagatgaactgcacttaaagcttttcccacactcattacatctaaagggtttctctccggtatgagttctctgatgttgaataagagctgatgaatgaatgaaggcttttccacactcactacatttgtacggtttctttccaatatgaattctttgatgtttagcaaaattggagctctggctgaaggttttcccacattcactacactcatagggtttctctccagtgtgaattctctgatgttgaacaagatgtgtgctctgactaaaagtttttccacattcactgcattcatatggcttttctccagtatgaactctctgatgcttagttagggatgagcaatggctaaaggctttcccacattcttgacatttataaggtttctctccagtatgagttctttgatgtttaatgagtgctgatgaatgaataaaagctttatcacattcattacattcataaggcctcactccagtatgaatcaactgatgctgcacaagatgtgtacttcgattaaaacctttcccacattcattgcattcataaggtctctctccaacgtgaattctctgatgtgttgcaagggatgagctttctgtgaaggttttcttacattcacggcattcaaagagaattctagtatgagttctctggtgtttagttaaattagctctgtggctaaaagatttcccacattcattgcaggtatagggtttctctccagtatggactctctggtgttgaatatgcactgaatggcaggtgaagagttcaccacaatcattacatttatgaggttttttctctttataagttctctgctttttcattaagtttgatttttgtttcaagcttttttcaagtgtatggaaggcataagatcctttgggaactctgtcttcagtgataaggacagatttctgattgaagcttttccagtatacatcatgctcatggtctgtttcctcagagagtgaattcatgtgagtgaacatttctctcaaatgtctctcctgatttccttgctgcttctctaaccaattttcacattcaagggctgcttccaagttagagtcatagacactattccgtgtcagtctgtctattattgcaactttgcatgattctgctttggaaaaatcttgcactgaagttgaatccttgctctgtggtctagtctccacgtctgaaggacattggaaatgcaaatttccttcgttttctgtgctcaacaaaaaggcagttctgtaataggtaagagttaatgaaagtgaaaagcatgccttcaaggagcaagtggatttgactctttcagatgacttgcaaagagaaacaaagggagggaaacaaatgctcagaatatgcagagaaaataagtacatcctatccaggagagtcggaagaggagaaagatgacaaaaaatataagagtagagatgccgatgaagcaatatatccatggatgagcagacaatgagtacacagatcaggatgggaagaaataactttttatagaatacctacttattgtaataaatttctaggcacacaaccatcttagtgtacagtacagttatggcttctaaattttcactattccaatcctactcacatccaaatatgtattccattgccagtttaatcttcctaacaatgcttttataacattttgctgatcaaaaacctcctatgatctcccaaaggcataatgacaaatatacgaaatgatatatgcacaaggctatttgttgaagcactaattcaggtagcaaaagactgataacatttcacatatcctactatacagaaatgattgaacatatagtggatacaaacaatggagtactatccatctccttaaaaaatgacaaagatctttacatattgctataaggtgaccaccaggatatattaagtttaaaaggaaaaagcaagatataaataagcacgcacagtttgctacttttttataaagaaaaaaaaggggtacaaatacctatactgtttgcttacatttaaaaaaaaataaaaaaaggataaatggaaaaccaataaaaatttgtacctatagggaaaacatcagaacacaggagagagggcagagatggaagcttaacctctctaaatatatctaatataaatatagtagaatttttatatccaatataaagttaatttatatagagaaaatattttaagcagtgtagttcaaagaaataaacaggagtaaaatagaagagcaaatacagaaataaagtatatgtaagaattaaagataatatgaaggtggtatttcagtcagtgaacaaaacatagatttgtttttccaatgatgccatggcaactgattaactattagaagaaaattaagttagatgagtcactcatttcatacactcaaataaattatattcattcatctatctattcatcttctatccattttattcaacaaatatttatagaatatcttccatgtgctaggctctgaactagtcacttgggaaaaaacagtcactatacatatagaggaagagaaaatttaatctaacattcatgagcaaaatctgaattgcagttttgccacttactagctgtgtgatactggataagttatttaacctctttacttcggtttccttatgtgtaagagagggcaataacagtatccgtcttgcaaggaatgatagcaatagctaccttaatgagcattaatgcaaatatctatgaagcatttaaaactctgacacagcataagtgctacattaagtgcttgttaaataaataaaacataaattgacataaggcttgtataggtaggtagaggtaaagatcctcaagtatggtccatgaacccctgggaaactataagttcaaaactgcttccaaaataacatttagatgttatttgcctttttcattgtctcaacattttcaatgatgtcgtaaaagtagtggtaaaattgcttacaacttcgcacaaatcaacacaatgatactaaacttactagtagtccttgtattcttccccatcatgtactcttggtttaaaaaaaaaaaagccagttttatttaaaaatgtctaaggaagcataaacattaatttcattgaattttaatccttgaagtgcctttttaatattcagggttaatgaaataggaaatattcgcaaagcaattctgtttataccaaagaacaatggtcgtcttgaggaaatataccatgcaatcatttgagttgtgagctgaaccagccacttgtttcacagaccaccattttacctgaaaggatgactgaatggcaaactatgttatctaacttgggtatctggcagacagtttctcaaaaatgaacaaagtgaacctgttgtatcaaggacaacaaatgagttttttataaaatttgagctttcaggcagaaattacaagttttggaaaacttctatttaccaccgagagcttgatggcttcctaaaacttaaaggcttttctgataaggtcagttgtgatactaaaagttataatattcaaaaatattgcacaatataaagtgtcaacaaagaagatctgcacttagtgaaccaatattgtccaaaagattgatagatttcaatatatgaaaaatttatggatgtggtttcagattctacattgtacctaatctttcagaaagtatcacttgttcagttttggagctgtttcaaagaagaatagccataattacctgaaaagactataaaatactccttcctttttcaacttatatctgcgtgacactggattttctccatgcatggcaaccaaaacaacatgtcatatcaagttgcattcagaagcagttgtaagaatatagctaccttctattatgtcatacattaaagagattggcaaaagtgtaaaacaatgccatacttcttcttttttttttttttttttttttagagtgtcactgatgctttatttacatgcgtcaccatctcttttacaaactagattacggttttaagtggaatacacaaggcaatatctacaaacaccaaggaaagtaagtactgcatctctatttcatttggaaaggggaagattcccaaatcaaactggttttgatccttaagaaaggcggcagagttaattcatggcaacatatggttagacaaaatcctcagtaagaatgccatatgatagtgttcgcattgaaagaaggatgaggtgcttcaaatcaaagtctgaactgcttgactctcaggtgtttaaatatggccacgcaccatatttagttctagattatatgggatatgagcaaggaattgaaacagataagacagtttttacagatactgtatacagattttttttccattcatgcaacttttttcttaaaaaaagttaaacatgtgaagccaaaatgcacaatacagttttttaaatattaactaatttttctggtcctccttcacatttgtttacatttcccatgtacataatgtgctaggacaagtatacaagagaagactgattgccaggcaatgagataattttagagaaataagtgaccagacacatagttcttaaaagcagccgcacacgtatttctggagtgtggcaagaggcctcatgaccaatcattcatcaaagaaaaatacaaacagatacaactaaagaagaggaaaatattccattcatttaaactgcataaaatgttacccacttaagatttagataaaatataatatactcttttatttgggcatccgcttcaagacctcatttgacaggcatgattccatcagaacttcacttcctctagtagtactctgcctccccagtctctgagagaggctagctttttcgtacctctttactggtgattgcatttctaccaaaaaaaaaatttttttttttaaattatacctaatcgtacaatgttcacccaaatacagcaagaaaaataaaaccagagttcagagctgttagggtttcttttttgctttgagagaggatgagtaacattttttttttttttttgacacggagtttcactcttgttacccaggctggagtgcactggcatgatctcggctcactgcgacctccgcctcctgggttcaagcgattctcctgcctcagcctccagagtagctgggattacaggcatgcaccaccatgccaggctaattttgtatttttaatagagacggggtttctccatgttggtcaggctggataacatttttatttcccctcgcaagcccttggcaccaacatggaggacttctttttgactgctttattcttcatggccttttccaagagattcaaatgctccttattctttaagtggggttcactaggtagaggcaaagtctgtccccaccatctttaaactgcgtataagtttggaagccacctgaaatcacaccctgagcggggcatacttgtcctgagtagtaagccatggtgtcctctcctcagggtggggaagcaacacacacaatgctaaaaattaacaccaaaaacaaacacaaagtccgccttgtactacacatgtgtgaatgatcctcccattaacaggagtgacaaacttctgaatttttaaaatgtgtttcagcaatcatattgcagaggaagcaataaaggaaaccaagctcagattcattcacatttaatggggtacactgagcctggcagccagttctcatgccaggacagtgaaggcttgtgataaagctctttcctagctttggtaacaggtatcaggttctggagccctggagagaacagcagatcccaagagcgcatgtcatgttttcaacattaggtactcttctaatttctcaccaaaaagtaggcggctccctagagcagcttatttagaggccaagtgtggcctcggatagttctcatcataaatcaaacattacagctgccaggccccttgaggctaagcattctgctgatatgctccagatcagaaaattattgttagggacccgtgacactcactcagaatgtgacatggtggccaacggctggcctgtcctgaaagcagggtctcaatataaggggcggaaggctctggcagcacccctgcccacttcagaaccgggctagtctctggggccctggcctctctgcaggtggctgagggtgagggtgccgggaccctacacaggcttcactaccagattctcagctgaccctctccaggggctggtgggtctcgcagtactgatgctgcacttgactttaccctggtctcagctctccacgacactctacatgtagatgctgttttagttacttgaaaaagaaaaaacaaaacagaacaaaaaaccaaagcattccctcttcattctcctgatctgttttatgctgccttgcccttgtaccttctctgtcccttcctcagctgtttcggattaaatgataatctggttctaggacattctgtaagacattctgcctgaaattcaacaaacgctagaaaaggagaataaatgagataccacatgtctgaaaagaattcaacattttaaagttgaaacacattggagggttgcctttctcactcccaaagcagctccctgggtctgtaaaactgcaaaggcaagtagcgattttgttagttactttgcatgtttctctgaactcaggacagaagttctcaggaccctcatgctggaagcactctagaattctcctatccccccacccttttccatctcgctccccactctagcccccatgctactactgcctctgcaatgcatccccacccagggcagcatcccttaggaagcttggagaggcaaccctccttcactgctactggaaagttcttgcatacagcacattactaaagaatccaggaagtggctagcattattataaaggaatatagtaagcaagtctggctcactgacaagcagaccatatgaatagaatacatactttaaaaaattatacatactttaaaaatgaagattataaacatgtagcagtttagaaaaggcaatgtgctacagtctactataaccacaattgcacaacaatttacagattcagtaaaaggcagggtgaaatcaacagggccatcgctcaaacatggcaacccaagcgaggcaggagacgtgtgacaataccaaatggaactctcattatgctaggagctgtgatcaccaccaatatcacccccagaggagttataaagccaaggcgcacaagggggcccctggtggccggtggtgtgtgcagggggttgggtggcacgtctgtgttggtgcccactgtcacggtgcaagcatcagcaagaactcaagcagggaagtctgtgctgaaatactagcctgtattcctaaggcccatgcataaggttccatttttgtactgtacataataaaatatatttatacatttatacgcctaatgctttttatgcaaagaaaagagtcttcatatatcactttggagaagtatgcatatgctgtgctaatcagagcatcgttataccaatttcatatgtaccaaaggtggtcccaactattccgtctaccaaagaaggtaacgaatataatcacactttccaggttaaacagaaagcacctatacagcaccataactttttgaaaacacaacaaaatgaaatccacagaagcagaaaaaaaagttaaaactgccctattttgtacttccattgagtcgcttgtacaattacaacctaagcttatatttaaaaaatcagtttatatgctattgcctctcactcatacacttctagcagatcagattatatagcaaggctgaaaataatcaaggatgtgtatttaggaaaacagtgaagttggaactgcctcagcattgacttgggtttttactctttgcacatttctcactgcaagcttaatgctcacctgtaagttcatttgttctgcaaagcaaaacaggactttttttttttttccttttctttctccttaaaactaaaccctttttgggtgacatttggcaatgagtggagagctgagctgatttctttcctgaaaatatcattattctagtttctaaccagcagaccaacactgttcacattagctgaggacactgacaggagatcacaggccctactgatctggcacccgtagacctggtgctggggtcccgtccacagatcaccctgactcagaactggaaacacactgggctggacgctgtgctccactcgttttgcctatgcatggttcagtcctggacgggtgcgcatagcaaacaattgtgccattgttcagtttttagaaaaggataattttctaccaaacaaaagaagaaagaaaatccccctttagtttatgtaatttgttagtttatggagttccatgcgctcaaaagcttgtgatgctcaaacctggaatggtaactggtacaacattgtctttctgtttttaaatttgctaggggaaggacggttaacattttaacagaaaaataccgcaagttaatgcatgtgaaaaactcagaaagtcaaaggaaaacaaacacaagaacaacacttaaaacatcccataaaccatcgcaatattaaaacaccacagaatggccgaagagggctcacggtgtgctctgaacgagggtgggtggtgctgaggggtgctgtcctccactggcaggcggctcaccaccctgtacaaagaagattttgcatactttttagagttctattccaagggtaagtgcttcacccagggtaaggggccattaacagtctctgctgggttaggaaaatggcgtgggattcacaaaggtgttaagctgtaaacggtatcactgtccacttgctgagagcagatttggcaaagggttttctctgtaggtcttgtgtcagtttgagggtctgctttgcccacttccccttcctcagtgatccttcagcctggcacccagctctgagatgaggcctgcttagcaccagtgaagttccccacgttcaaaccaacaacattctgtgtggagatgagggaatcaaagttaaaatccaacccatcagcatccatgagttcactacggataatggactccatgtcacattccaagctcccattgaacatgtccaggtccaagtcgctggggaacttctcatggcccatgacgggcaggtttgcactagttgagtacaaggaggagcctgagagagagtccgagagggtttgcatagactggctgacaggagactgctgctggtgtttggctgacccaaggctgctggactcactcaagcccatgttgctgacagaattcgacaaggcacggctgccaccaagagcgccctgggtttggtgctggtggtggagcaagttctgattgaccacacttccctggttaggctgggcagcaaaggacatcatcggatcattgcgaagcatcacgttccggcgggaattctgggcagacacagcggtgctggcctgagacatcaaggggtccgactgtgtcatcatgacatcgctgtggctaagtgagtccgaagtgagcaggtcctggagtgtctggttaccatagtgtgacatggaagagaaggtagctggcttgttctcttggatggtctgcatgggagactggcgtagggagttcagagatgaaggtccaaacaccgtgctgttaaaggagctggttggggagctcaggcccgagcccttggtggtatacgggaagctagaactccgctgcatgagtcccccagtgggcgatggctgggatggcgggagcgtgatgttatccagcaggtcgtccatgaggttttcagtcagccccatcattcagattcatggtgcctgccatgtcagtcagccgtagcagttccaccgtgcacggcttgcttactgaaggtgacaggctcgctgagctgctgtagagcatgggcgagagaggcgcatcgtcgtcctggacttcatccaactctgtgcttgccatgatgggcgacaggcggccactgactgtgctggcgttagaattggtgcgtgaacggaagtccgtccacgcatccagctcatcactgctgcgtgacgtggggctgccagaccacttggagagctgggagggactgtcgtcagctgattcgggggctgtctgcagggctgccttcttcttggctgtgcggccacggctcttggtatacttgttgctattgtccatggagacagcccgccgccggggggcttttccgctcttccccccatcagggttgatgatccaccaagagctcttgccagttccctcattctggacccgcatgaatcgactatgcagtgacaggttgtgccggatggagttcttctagccggcagagctgttgctgttgcccttatccttgaagtagggcacgcaactcaccatccactcgtagatctgggacagagtgagccgtctgtccggggagctctcgatggcgcgggtgatcaggtccgcgtaggacaggtttccccaggcgttccgccgcgacgaacatttcctcggctgcccggagcccccagccgcccccggctgcggcggtggcagcggttgctgaggctgcagcagcgcctgtgtacccccgctcagcccgcccgccgcggtggctggcccagacccggggtcttgccctccgggtgccagcacccggaccgagtcctcaaggagcagcccggagaccagcgtgcggctcccgccgccgccgccgatcgccatggccgagccggcccgtcccccgccgtcctcgtcgtcttcatcgtcctcctcctcggggatcatggagtcggcggccgtctcccccgagggcttggcagggctcgcttggagctccggcctttgcaggggccacgtacaggatcgcggacggctctggggctcgaactccgggtccagctccacttcgagcggagaaagcggggccggggaagccggtgcctctgccatcttcgccgcccgcccggccgcggctggggttctcgcgctctcctctcgcgccggggcggggtgcagcgggggagggacgtggacgccgcgaaggctccggctcccgggcgccgccgccgccgccgccgcctggggaagcacgagagaagagagaaggagagttggttatccccggccggagccccgtcctcggcgagtcctcgcccgctgccgccacctcccagtcttgccgcgcccgcctcccaggaacaggagaccatacttcttaataacactttttgtttaaagaaaataatgttttttaataaaaaaatatactgtgctaacacatgacatgtttataattttttatttctatttttcttttaagagatggggtctcactttattgctcaggctggtctctaactcctgggctcaatcgacccacccaccttggcctcccaaggcactgggattacaagtgtggaccaccacatccggccaattatttttaaatgaattagctaatagcttgaaatttttctgttttaacttgtagtatagtaactattggtagatataacctacataaatgaaacatctttagggtctttaacaatttttatagttacagtaggtcctctgatgccaaagcattcagaactgctacactagagcacagagatggaagaagagtagttgtgaaatgaggttgggataatgagtaaaagccagatttcacaagattttgtagacctccaggattttgtctgttaccgtgaaggcagcgagaagccattcaaatgttccaagcagagtgatgacaagacgagatttgattatgaaaatatcagtctcactacaatgttgagaatgaagtatatgagggcaaaggcggaatcacaaagattatcacagtaatccaggaaaacaaaaaatatatgaaggaaaattaacagtgaagaaatacttagaatataattaggtaaatacagtgatggataaaggagagagggggtgatgtaaagactgtgcgtagatttccaccacgtacaatttgatgacaataagtaccattaaaacaattactggaaaaggatgttgttggggagatgggaaatttagacttattttagacattcagttttaaacatgttgtattgaagtatcgttgacataagcaaacaaaggaatcaaatagttaagatgttgagaacagccctgaggagagctctaggatggaaataccaatttgggactcatcttgatagaaggtaactggttgtgggaatgatgagactaatgaagtagtaagtagaggctgcaaacagttgatcagttggccaaatcagaccttagacacattttctttgggccacactttttatacaaacttttaaaactagttatacacagttaaaaatagggagattattgctggacgcagtggctcacgcctgtaatcccagcactttgggaggccaaggagggcggatcacgaggtcaggagatcgagatcatcctggctaacacggtgaaaccccatctctactaaaaatacaaaaaaattagccgggtgtggtggcgggcacctgtagtcccagctactcaggaggccgaggcaggagaatggcgtgaacccaggaggcagagcttgcagtgagccaagatcgcaccactgcactccagcctgggaaacaaagcgagactccatctcaaaaaaaaaaaaaaggggggggggagattacagacaaatgcaaatttagggtttctctcttgaaaaaaactggaagtgtactgaacgacaaccaccatttagagcagggattggcaactacagcctgctgcctactttgctaaataaatttttactggaacatacccattcatgtatgcattttctagggctgctttcatactactgtggaagatcgaatggctgcagagacaccatgtcccacaaagcgtaattatttactgtctagccatttacataaaaagcttgccagccattgagctagagctactcctttcagttgaggcctgtactcctctggttcaccagtttccactttgcttgcttaactcagtgatattacctcctggcccatgtaagtactcaagtttatgactccaggtatacaaaaggaagggagattaaaatcaaattttgagtaattagaatatttaattgttcaaaaaagaaggctaagaagatacactcagagaagtaagaagtaattccaaatggattaagaacctaaagaaaaaattaaagaatacactagtaaacagaggcaaatatatatgtaaccttggattaatgaaacacattttaagcagcactgaaaaggcagaaaaaaaaagattataaaaaattaaacttgtacatcaaaatgcatagcaaaactgaaagtcaaaaactacaaaaaatatctgtaacataagaaaaggtaaaaacctcatatataaggacctcttaacagatcactatgaaaactgcaataccccaaaaaagggagatgggtggtgagtggtaagtcacagaaactgataggtctctgaggtgaaacagatatatccataatcacagggaaagacttttaaactgtttcaatattcaaaagtataacttttttaaaaataataatatccaggaaggattttctttatgagctatatataatactaagtatagtaaataaaacagtctggtattagacatagacagacaagtaaaccagagagacaagaaacagaactaagtatgctgaggaactgggtttaccacaggtagcattacaaatcagtaacataaaattattccatgaacaatgctggacttattggctttcagcacggaaaaagacaaaattagttttcccatttcatcatatacaaaaataaatacctgtaaaacaaaattgaacattttggaataaaataatctttctgacactgggataaagtagatagacaattcacaaaaagcaatatttaaaaaaaaatttgttattaaaaatgtttaattctatatgcctaacacaccagaaaataaaataagccaaagattagaagaaccaatttcttctcactgacttgcaatgctacttctgtcatagattagtacctaaaatacatgaagaactccaccaaatcaagagaaaagatataaacagcccaatctcaaaaaacaggcaaagggtatcaacaggtaactcacaagaaacttgaatagccaagtaacatgaaatgctcaaacttgtatttatcactcagagaaatgaaaattttaaaacatcattttgcatccatcagattgacaaaaattaacaagtctgataactcaactgttggcagttcctagtaaagctaaacatgtgatgatttaagacctactaattcttcttccagttatctccctaaaccagctctcaagatgaacataaggaatcaaaaaaaggatgatcactgcaactgctactaatggcaaaaaaataaactgttcagtttattcatacagtggacttatgactccacagtagttaaaatgaataaacataattcatatatattaacatagattaatatcaaaatacaatgtgaactttaaaaaatcagactacataagaaaaagtgtaacaataaaacatacagattgttttacatacatatgtatatatctctgtgtatacacacacatacacaaacaccgaaatgattcacaccaatttcaagatataatggttacttctaggggagaaagagaataaaagggtttcttttctttgctttttgttttttttttttgagacacagtctccctctgtcgcccaggctggagggcaatggcatgatctcggctcactgcaacctctgcctcctgggttcaagcaattctcctgcctcagcctcccaagtagctaggattacaggtgcctgtcaccatgcccggctaatttttttgtatttgtagtagagacggggtttcaccatgttggccaggctggtctcaaacttctgacctcaggtgatccacccaccttggcctcccaaagtgctgggattacaggcgtgagtcaccacacccagctgagaataaaagggctttaactgaatatgtaatatttttatttcttaaaaaataaaagatatcacacacctcaaaaggatggctaaaatgaaaacaagcaatattaagtgttgacaagcatgtggaacaactagaacgcacatattctgctgctgggaatgtaattggtacaatgactctagaaacctctttggcactatctaccaacagtgagtatgtatctatcctctgataaaacaagtctacttgtatgtatacaaggtctgttccgcatgaaactcctgctggggaaggacttccctgcctccccacccaagggctacttcctgaccaagatcttccacccgaacttgggcgccaatggcgagatgtgcgtcaacgtgctcaagagggactggacggctgagctgggcatccgacacgtactgctgaccatcaagtgcctgctgatccaccctaaccccgagtctgcactcaacgaggaggcgggccgcctgctcttggagaactacgaggagtatgcggctcgggcccgtctgctcacagagatccacgggggcgccggcgggcccagcggcagggccaaagccgggcgggccctggccagtggcactgcagcttcctccaccgactctggggccccagggggcttgggaggggctgagggtcccatggccaagaagcatgctggcgagcgcgataagaagctggcggccaagaaaaagacggacaagaagcgggcgctacggcggctgtagtgggctctcttcctccttccaccgtgaccccaacctctcctgtcccctccctccaactctgtctctaagttatttaaattatggctggggtcggggagggtacagggggcactgagacctggatttgtttttctaaataaagttggaaaagcaaaaaaaaaaaaaaaaaaaaagaaagaagagaattattcccttaagataaaataatatgtaaaaatcactaagtagcccctaagtagaaaagacattatgaggaaaaatgacctttagcctagaatctgcatatacataactaaatcaacattcagtggagattaagtgcccaaaaattagaagaaaaagccagaacaacaaaaatgcaaaccattgcacaaacagcaggaaaactacaaaagaggaaacaataaagcacaggaaacagaattataaaaatcacatggcaagaaaagtttgaaacacatgtattatatgtgaatgagcaaatttcccttataaaaaggtttttttaaaaagccacatcctatatacagaataggccatcaaaacaaaatattattgctgggttgggtactggtgggtagatggaaggaaatatagtataccatatgtctgaatacagtagtgcaagtacaacaaaaaatgtgaaaaaatatacatagtagagagaggcagggactgaatttgagggggaagtagcattacctttacatttctgtatgtctgtgttgttcactttattacattgaagaactaaaacttttaatatttttaaaaatctaacaaatcaaaggtaaaaaatagcccaggcaaattctaacaagaaaaaaagctccaatattgcattttaaaaatctaataaaatgcaaaaagaacaaagagagttttaaaaattttccataataggttcaatcaccttgatgctgttaacagtgttgaatctgatatcaaagtattgaaatatatattcacgcttctggtaccagtgccctaattttcccctagctactatgcctggccactttgaatctgtgtagctcaggtagtactgacgccatctctgactcacgggtgggatgtttgtgcgtgcacgtgaatgtgtgtgtgtgtaggtatattctataaagaattacacttaaatttggccaatatctcatccaggaatgggcctaataccccattagagtcaatcccagcacttctgcaagaatgactagaagagaatctgccctttttctctggccttcaacacaggaagatgtaagcctaaactcgttagaggccaacactaggagaaaaacttgtttggccataaaacccatggagagcaaaggtcagtaaaatgaagaattaggttttaacattcttgtttgagccctatatgtagccagacctagatttttcagtttgttagtcaatagttacttcttttcacttagacccatttgaattgattttatccgctgcaacttaaagcttcttgactaataaagtcttcaagactaatgtaagacagttgagaagccaatggagacaggcaagtacataaaggaagtgacttttacaaacactatgaatgtgcagtatctactttttacactttggattacagaagcaaagagaaaggctgattgaggaatctctgggttgtggtatgccacacacatcatggaaagctccttttttcctcctcaactttttttttttttttttgagacagtttcactctcacccaggctggagtgcagtagccctatctgggctcactgcaacctctgcctcctgggttcaagtgattctcatgcctcagtctacggagtggctgggattacaagtgcgcgccaccacgcccagctaatttttgtattttaagtaaagacgaggtttcaccatgttggtcaggctggtcttgaactcctgacctcaggtgatctgcccgccttagcctctcaaagtgctgggattacaggcatgagccaccgtgcccagccctaacttcttttaataaaagtttcaaacatacaaaagttgaaagatgaatgcaataatcactgatatagtacaatcaccgcctaaattcaaaaattcttttttttttttttgagacagagtttccctcattgcccaggccggaatgcagtggtgcgatctcggcttactgcaacctccacctcctaggttcaagtgattctcctgcctcagcctccagactagctgggactacaggtgcgtgccaccatgcctggctaattttttgtgtttttagtagagacgaggtttcaccgtgttagccaggatggtctcaatctcctgacctagtcatctacctgccttggcctcccaaagtgctggaattacgggcatgagccaccacgcccagccaaacattcgtaatatttgtcatatttaccttttgggagagaggggccaacaatataaaagtaagttgcaggcatgatcataccttagctttcgtcatctcagagggctggattctaactgtaactctttaaattacgccttcataggctttccttttccagtgtttctttgaactatgtgagtatttattatttttacaatcacttcagcatttaagtgctttcttagattgccacttaaagtcacatacatgctgtttcctctagagaaacaagttttaagaggtatgtgccacattatatttaaaatagtttctcacattaccaagcacagaaatgagcataggaggctaagaaagggaaatgctgcttacctatctgttgagggacaataaacactaaatagggaagaaatccatccagtgttataagtagaaaacattttcttctgagtccattagtctcctgactagtctcttagatttagaactcagctctgcagatgggctttagtggataaagaaactccacatcacaaagaagggagtgcatctgtactctaagaaacaaggtgtaattccaataatcagcagactcactcacctgggatctggccgtgaggcgcagagcagccacttctccctcttctgtgctcttctcttggaaatggggagaatcctgggaagacagaactaacgacaagaaagcagtaatgatgagacctaggcttaatgtgccactcagatttaaagtctaaaaaccgcttcaacatactatatgtgctgcctacaaacactgagactgaaggtacccccaaaacaaccgacctcctcccaggaccctcttcccgggatatgcgggaatattgctactctgggctcgaattcagttgctataatcataacacattctgtaagatggcatcctctgatctagaaattagaatatgtcagtaaatttcccagcttaatctatactcgttggttctcactctgaaagcttatttataatgtagattgctggaccccacctcaaagtaataagcattagttgagcctggggtacaatccagaaatctaacaaccaccccagggggaattctggtgtaggaggtcacagcacaaccttcacgaaactggtcaggtagaatggaagtcagtcattaactactacgcctgttttctcctatgtaaaacaaaacatttttgacaaccaaagaggtgaattcttgccatagaagttaacatttcactcacattttgggggtagctttgaagggtccactgtgtgcccagctgccatggaaagggcggtgctcccataccaagctcttcagtctcacttaaaaagcccatccatccccaagacaatggagacagccagccaagagccacctcccctgagccaaccgttttcccttcaggagcaggaatttcgtccttccacgctacaagttcaacacgtccgcaattctcacctcctttctcaggcatttcagccaaatctgtctccatgatcaccacctcctccttgttctggagattctgctcttcaccccaattcagatctccctggccagacgagttagaagccccccgggcctcgtggtcccacttcctgccttccctcctgggctctgatgaaaggcctgggttagatcgggtctctttctcaccgtggagtctgcctcagtcctacggcgctggagcctggaagcccggggacagcatccctgaggctgggtcctcagatgtctgtccctaccgcttgaagctgtccctgggggaaccgggcgcctggaagaggtgacgctggggcatcaggagtttggacaaattctgccgcgctcggggcactggcccaggaccccgcgaccaccccgcccgtggcacaaccgcgtcccccgaggagaggatcaggccagagtgagaagggacagggctcatggtctgccctcgaggcccctttaacaaacgcgcactctagccccgactcggcacagaacgacccggggaactaccgccgaggccgagccgagacgagagacatcaccacaagcaactcacctcccatcccgggcctcacaaaggggacgaacttctttggccagctcggagtcgcgcatgagtaagaaggagcggagccaggcgtgctgctctcattccgcccggaactacaattcccagaagcgccttggcatcgccagactccggttctccgcaggtgggagcacccatggtgaggttgggagaatcggccgatcgaagagctccgtccgtctcgcgagagtatgaggcagcatctcctgtgtctaatcctcagggcaagggagggagggagcagcggagacgcggaccggagtcagggtccgtccccgcgctttgtctgcacaagttcctgtggcacagtgcttagggctgctgagttcaacccaaattactccggtgtaagatacgttaaaatacatagcttttatccatattttgtgcgcccagaactcatccttttgctttcaaaacatacgaaggatgtttttaggaagagcaggtccctctttgtacactcagtcagatgttcctgtatccacagactacttgtaatcctaaaattcatgtatttaaaacgagttgaaaagattgaacctgttgtaacaaatttaagcaataggttctttgcagacataagcattagtttaaacgtagcataaaaggtggttctttcaagggagggttattcagtctctccaattctgttagaggactaacccatccacctccagcttcgtgtctagactgccctccttttctcagtgaatgacattactgcccactcactcatttgcacaaaccagagcctgaatattcttaactctttgatctcaccatctatttatcaccaagtcctattcattatatcttaaataactcaattgtttccatctttctctattcccagtagcattaccttagttggggccaccaccatttcactaggattgccgttgcagcctggtaactggattccctaactaaggttttctctaccaccaatctgttctcgacactttctggctagtgctctttctaaaacaagaatatgctattactttagtgcttcaaaccgttcagtggcttttagaaacttcaaggaaagatgatttccagctcccagaagggatttgtaactcccgttatctcagccacctggtagttacacctttgtgcaatcccctcttgtgtatggactgggacttgcttctaaccaatacagtgcaataaaggtgacataaaagtctaacgtgtgtcttgctaggagactcctctcttgctggctttgatgaagtggtggtgatgttggggaggcccatatgacaaggaactgaggatggcctccagccaatagcctgcaagaaccgaaggcccttggtcccacaacctgcaaggagctgaaccctttggacagctctgtgtgcttggaagtgaatcattctttgtagagccttcccatgagaaccctgtcttgcctgacatcttgatagctggctgcaaaggactcacttaagctgtgctcagactctcacccatagaaactatgagataataaacgtgtgctattttggaccactgagtatgtggtcatattgttatgcaggaaaatttaattccactttctaacataaaagaggatcttctttgtcaaaatccaatctgggaattgtctggaagagggaaaattgttggattgagcaactattgaaaagttgatttgaaacccacaggaagacaaatggctacagttggtcctaggaggtgtgtggcctgtacacgtacttttaaaaagctatcctaagaatgataaaggaggatacaggaaatatcaagcaagaacttgtcataaaaataaaaacaacgaaactgtgtgtcaaaatatgatggttaatactagattggatagcagaatgtgtaaaattgaaaagtgaatatctagaatattctagtgaagctgcaatatcaggctagggaactctacacttccagaagatatcaggaagggagaaaaagttgaaaaatacgaaagaaatattaagcagtatggagcctgactagactttatgagaatccagaaggaaagaaaaacagagaggaggaactattttaagaaataatcaagaattatggaaaaataaaaaattaaagacttcatagtgaaattattcatagagagtcaaacaaaattatgaaaagacaccacatattacggtgaaatctaacgaagaaattctaaagccttccagaaacaaaacatagatcacctacaaaagaaaacaatcacaattaaaaaaaatcctcagtgttaaaaacagtgcctggaatagtaccaggtagtgtcagatctccatcagcccggacagtgggaactaactggtgcattccccacacttaccttccagtgggttgctgatgagagaacctgaaaaaacctaaacctcggccgggtgcagtggctcacgcctgtaatcccagcactttgggaggctgaggcgggcggatcacaaggtcaggagatcgagaccatcctggctaacatggtgaaaccccgtctctactaaaaatacaaaatattagccgggcgtggtggcaggcgcctgtagtcccagctactcggaaggctgaggcaggagaatggcgtgaacccgggaggcagagcttgcagtgagctgagatcgcgccactgcactccagcctggggacagagtgagaccccgtctcaaaaaaaaaaaaacaaaaaaaaaaaccctacacctctacagcaggtcgaattcatgacctgaagctgaatacttccagcatatttttcccagtagataggaataaagtatctttgcagtgctctgttccctccgtctccccaaacatctgacaccctaaaagccatccagcagctatggagcctgagcgacacgttgatttgtgttgtcacctgaccaagcctaaagacctccagctcagtccccgaccttcatcccaccccccagatgataaaattcagacctctttcctgaaaggcagaggttaaacattcaggactgtttctggccgaggacttcttccaattaaaacccccaccgtgggctgtctcccctcatttcatttttctaaaggggcagaggcctcttttggaaaataataaaattcaatgtgtgtgatttacttttctgatctctttgagaaatacaggaatataaaagtatgttcttaattccagaacactctttttgcataaatacctcattgggcagctttctaactgtgattttcctgagtctcccttcgttggatctgccggaagacgagtcagggaacctttagtgagggtacttcttcctatttttcttctgtttttggaggcatacacattatgcataaccaaaacaatggctcaattgtgtttaactttgtattttgattgttgagaagaataaaaggtatcaacgtgaaaaaaaaaaacagtgcctggcattttgtggcttctcaacaaataataattaaataaataaatctgatttgtcaatagcaggactggttacaagaagaaaatgtaatattgataaataatatttgtacatatttatggggtacatgtgatattttgatacatgcatagtacatataataatcaagtcagggcatttgggatatccatcaccttcaacatttatcatttctttgtgttggggaaatttgaaatgttcttttctagtgattttaaaatatacaatatattgttgttaactgcgttattaaagattcttattctttctatctaactgtgtgtttgtacctgttaatcaaccccttttcatcaccctccacacccttcccagcctctggtaatcatcattctattctctacctccataagatgaactttgttggctgccacatgtgactgagaacatgcagtacttgtctttttatgcctggcttatttcacttaacatgatgaccttcagttacatccatcttgctgcaaatgatagtatttcattttttattatggccaaatagtgttgcattatgtatatataccacattttctttatccagtcatccattgatggacacttaagttgctattgtgaatatggctgcaataaacatggaagtgcaggtatccctgtgatatactcatttcctttcctttggataaacactcagtcatgggattgctgaatcatatggtagttctattttcagtttttaggccgggtgtggtggctcacgcctataatcccagcattttgggaggttaagatgggtggatcacttgaggtcacgagttcaagaccagcctggccaatatggtgaaactccatctctactaaaaatacaaaaaagaaaacattggccaggtgcagtggctcacgtaatcccagcactttgggaggccgaggtgggtggatcacttaaggtcaggagtttaagatcagcctgaccaacgtggcaaaaccctgtctctactaaaaatacaaaaattagccaggcatggtggcacatgcctgtaatcccagctactcgggaggctgaggcaggagaattgcttgaacccgggaggcggaggttgcagtgagcccagattgtgccactgcactccagcctgggtgacagagtgagactctgtctcaaaataataatgataataaacaaacaaaaaacagaacaaaaaaaaaactatctgggcatagtggcgtgcacctgtaatcgcagctactcaggaggctgaggcaggagaatcgcttgaacctgggagggggaggctgcagagagccaagatcatgccactgcactccagcctgggagatagagcgagactccgtctcaaaagaaaaaaaaaggctgggtgtggtggctcacgcctgtaatcccagcactttgggaggctgaggtaggcggattacctgaggtcaggagtttgagaccagcctggccaacatggtgaaaccccatctctactaaaaatacaaaaattagccgggcatggtagcacacacctgtaatcccagctactcaggaggctgaggcaggagaattgcttgagcccaggaggcggaggttgcagtgagctgagatcatgccactgcactccatcctggccaacagagtgagactctgtctcaaaaaaaaaaaaaaagaaaagaaaagaaagaaaaaatagttttgctgtatatagtaccctgggctgatcagcataaaaaaatacacattcacaaccataaaaaatggatgggaggtggggaagaaacataggtgtgggttttaataaattaggtacaagcaccaggagaataaaaataggatgtaaaatattcaaagtgactggccggtgcatggctcacgcctgtaatcccagcactttgggaggccaaggcaggtgtatcacctgaggttgggagtttgagaccagcctgaccaacatgcagaaaccccgtctctactaaaaatgcaaaactagccaggcatggtgttgcatgcctgtaatcccagctacttggaaggctgagacaggagaatcacttgaacctgggaggcagaggttgcagtgagccgagatcgcgccgttgcactccggcctgggcaacaagagcaaaactccatctcagaaaaaaaaaaaaaaaaaaagaaaagaagtgattattccatggaaactgagagaagaggaatagaagaaacagaaagtatggaaaagagaaaacacaaccctgtgtcaaaaaaagaaaagaaaacacaaaataagacctattatataatttatcacgataaatgtaaatgggtcaaacttatctatcaaaaggctgagaatctccatttggattaaaaactagtaagtagggccagacacggtggctcacgcctgtaaccccagcactttgggaggccgaggagggtggatcacaagatcaagagatcaagaccatcctggccaacatagtgaaaccctgtctctactaaaaatacaaaaattagccaggcatggtggtgggcgcctgtagtccccagctactcaggaagctgaggcaggagaatcacttgaacctgggaggtggaggttgcagtgagctgagatggtgccactgcactccagcctggtgacagagcgagactctatctcaaaaaaaaaaaaaaaaaaaaaaaaaaaaaaaaactaataagtaaaaaaaacaaaatgcagcaatattttttttcaaaacgtacattggaattcaagcaaaacaaaaatattaaaatccaagttattactaaatataaaccaggctaatatgaacaaaaaatagccagataacaatgttattattaataaaattaaatttggttgggtgcagtggctcacaactgtaatcccagcactttgagaggctgaggtgggaggatcacaaggtcaggagttcgagaccagcctggccaacatagtgaaaccccatctctactaaaaatacaaaaattagctgggcgtggtggtgggtgcctatagtcccagctacttgggaggctgaggcaggagaattgcttgaacctgggaggcggaggttgcagtgagccgagattgcaccactgcactccagcctaggcaacagagcgaaactccatctcaaaaaaaaaaaaaaaattaaactcaagattaaaaaaacattataatggacaaaaaatggacattattttgtaaaatttgagaagaggtatgacctattgtatttgaccttatttttactttttctattgttccttccttgcttcctgatactccatgatactttcatttattatattctttttgtttagagaaattcctttaaccattccttaaggctaaatctgatagcgacaaattcttgtagtttgcatacatttgagaatgattggatttccttttcattcctgaaggataatttcactggatacaattcacagtttgcagttccttttctttttttcttcgagttgacagcacttaaagaatgtgttatttgtttctggccttcatgatttcaaacatgaaacctggtgtcatcaaattggtgttcccctggatgtaatggaaacatttctgtctgctgctgttaatagttgttttatctttagtttgcagcattttaattatgatgtgtcttggtaggaatttatttgactttatttggggttcgttcagcttcttgaatctgtaagtatatgtctttcataatttggaacgtaaaccagatttgggaaattatattctgctatttctttaaatattctcagtcctactcttttttttctctcctgggactctgatgttaagattcctggatcttgtgtcattgtcccaaagaaaggtccagaggctgtgttcatttatttttagtccattttctttttgttgttcagactgggtaaattacagtgatctctcctcaagttccctggttctattatttgtcatctccactctactatcaagcccatccagtgagttttaaatattttagtaattgtatatttttaatttcataattttattttggttctttttttataacgtatttctttgctaagattttttattttttcatcagttttaagaaaatttgtggccgggcgcggtggctcacgcctgtaatcccagcactttgggaggccgaggcgggcggatcacgaggtcaggagatcgagaccatcctggctaacacggtgaaaccccgtctctactaaaaatacaaaaaattagccgggcgtggtggcgggcgcctgtagtcccagctactcgggaggctgaggcaggagaatggcgtgaacccgggaggcggagcttgcagtgagccgagatcgcgccactgcactccagcctgggcgacagagcgagactccgtctcaaaaaaaaaaaaaaaaaaaaaaaaaaaaaaaaaaaaaaaaaaaaaaaaaaaaaaagaaaatttgtaatttcttactgaaactgttttttatgagggtttacctcatgacaagatgattccagaatctgattcttctcagtataagcattagttgattgtcttttgtctttcaagttgtgatattcctatttcttgggatgatgggtaattttggattgatttctggatattaagacactttgggttctatttaaatctttcattttttagaagatttatttaggtttagtatatagtatacaggccttggtctactttttgtggtgggctgtgcttccagtgactatttagtcttcagaacctttgtgtcactattttggtccgctctgggttatctactgatccctgctggtgttgcctgaatgagtggaaagaggttgcccagtctgggccaaggtggggaaagggaatcttcagtccatatggaagtagagtgcttcctgtgtggagtcctctatctctatacggtgggatttccacctgcctgtactaaccaaccacctggtgtctctaggggtgtgtgtgtgtgtgtgtgtgtgtgtgtgtgtgtgtgtctgtgtgtctgtgtgtttcgggtgggagaataggaattcccaggtctgattgggcttctgattgctgtggcaggtcccctgtgatggtactgcccaaccacctgttgctctagatgggagaggagagtctcaggcctgatgggatcccctctggctgcttatggttagtggggtttccaatcaatccctccaggcttacctggtgttgttagtggggcccttgttccacagggggaggaataagtctacgtgggccatcttctattgctaggcttggagttataagatgccccactaacatgatgttcctccagtcctggggtccctgtctacccagtccaatttccttttcctacctgtcagagttcttgtttgttatttctagtgttcatagtaatcagcaggaaggaacgaggaaaaataaatctacaacaccttgtctggacacattataaacttataaaaggaatgtgagatcaagaaggtataacgactgaaagaaaaatcaataactatagtcggaaaattttacataatcctctgaaaaaccaatatatcaagaagataaaaggaaggagagctttaggagtttcaataacaggattatgaatctcaagataataggtctacatgcaactttacatgcaacaaacagagaatatacattcttttctagcacgcatgcattattcagggaagttgaccatatgctaaaatacagatgattcttcagtgagatttaaaataattcacatgcatcaataccactatatatagagagaaatataatgtaagccacatatgtaattttaatttttagtcgctctattttttttttttttttgagacggagtctcgctctgtcacctgggctggagtgcagtggcatgatctcggctcactgcaagctccgcctcccaggttgttgacattctcctgcctcagcctcccgagtagctgggactacaggcacccgccaccacgcctggctaattttttctattttttagtagagacggtgtttcactgtgttagccaggatggtctcgatctcctgccctcatgatccacccgcctcggcctcccaaagtgctgggattacaggcgtgagccaccgcgcccggcctagttgctctattttaaaaacttttaaaagaggtgaaattaattacataaacatatttgtttaacccaacatatccaatatattttattttagcttgtaatcaatatcaaacttatcaataagatactttatattgtttgcactgtcttcataatttggaggtgtttttttacacttacaatgcttctcaattcagactaggcacacttcaagtggttggtacacacatggctatattggctgccattttggacagcacagatctattgctctttgaagatatgcaataaaattagaaatcaaaaagaaaagagagctcaaactttttctgaatattaaaaacaaaaataaagaaaaccccacaatactaagtaaatttggggttaaagagaaaatagtgtaagaagttacaaaatagttaaacctgaatcacaagttattcagaaatgttagagtacgtctagaagagtatttagaaaatatttataatttaaatacatttaagaaaaattggaaacaagtgagctaagaagtttattcaaggagcaggttaaaccaaaggaatacgaaatacagaaataataaatgctcaaaaatcaaggaagtcatgtacacaaaaaccaataaaaagactattgaaagcaaaagctgggctgggcgtggtgtctcacacctgtaatcccagcactttgggaggctgaagtgggtggatcacctgaggtcaggagttcaagaccagcctgaccaacatagtgaaaccccatctctactaaaaatacaaaaattagccgggcatggtggcatatgcctgtaatcccagctacacaggaggctgaggcaggagaatcgcttggacctgggaggcagaggttgcagtgagctgagatcatgcaactgcactccagcctggatgacagagcaagactccatcttcagagcgagactccatcttaaaacaaacaaagataaaagctggtttaatgaatagattaataagatacacaaacttcaaataagaatgatgaatttaagagagcagatgaagttatacaactgcagattggataaacagaaagagaggcacaatggacattattaagcaccaatacatttgaaagcatagatgaagtagataagtttaggaaaatatgaaataaataaaaaggtacaaaatgaaattggaaacttcaatagctcaattaccataaaagaaattaaaatgtggggcacactccaaattctaccaaactttcaatgaactgatcttctctatcttatataaaaggtgttctaaaacaactcagaggaataaaaagagataaagcggccagatttattttagtaatttaatataaacttggttcttaaaatggataaagataatacaaggaataaaaatgaaaattatgagccaattttacttacggacataagtacaaaacctaaataaaatattagccaactgacaactgaatttttcttttttttttttgagacggagtctcttggctcactgcagactctgctccccggcttcatgccattctcctgcctcagcctcccgagtagctgggactacaggcgcccgccacctcgcccggctaattttttgtatttttagtagagacggggtttcaccgtgttagccaggatggtctcgatctcctgacctcgtgatccgcctgcctcggcatcccaaagtgctgggattacaaaggcgtgagccaccgcgcccggcctctttttttttttttttttgaaacagagtctcatactgttgcccaggctggagtgcagtgccacgatctccgctcactgcaagctctgcctcccaggttcatgccattctcctgcctcagcctcctgagtagctgggactacaggcgcctgccactatgcccggctaattttttttttttttttttttttttgtatttttagtagagacggggtttcactgtgttagccaggatggtcttgatctcctgaccttgtgatccacccgccttggcctctcaaagtgctgggattacatgtgtgagccactgcgcctggccagccaactgaattttttttttttttttttttttgagacggagtctcactctgtcacccaggctggagtgcaatggcgtgatctcgactcactgcaaccgctgcttcccggattcaagcaattctcctgcctcagccttccgagtagctgggattacaggcgccagccactattcccagctaatttttctatttttagtagagatgggttttaccacgttagtcaggctggtcttgaactcctgacctcaggtgatccacctgtcttggcctcccaaagtgctgggattataggcgtgagccactgcacccggccagccaactgaatttaacctatatcatgatcaagttgattttaacatcagaaaatctagatatgaaatttgctacattaatggattcttaaggaaaagtaaaaccaaataactaactcaatagaaatcattgataacattcaatatctgttcataattaggttaaaagttaatttcttaatttagattaaggaaagtttataacaaagaaagagctggaaatagagcaagatggctgactagagatgtatggatcttgctcccgctcctcctatccaggaaggaccaaggcgatgaataaacaggtaaaacagctaaaattttactgaaatgttgaagggaaagcactggagtgcagtgggggactgcagaggcagctgaggtgattggaaatccaggagagcagtgcagagttacccagcctctgcagccccatctgctccacccagcttcaatcagcctggagacaggagggacttccccttacaggaaaagggtaagcagaacaactccaccagcccccattgccttacccacagtccttactacaggagaatgccacagtccttgaaagccctgagcctagttttgagagctgtctgaaattcttgctaccacactgctccggattaggaacagaaagtgtgtgctcccaacctccactcacccactgtgagtcaagctgtggcatcagcagcactgtgccatcttgagactacagccacctctggagtgcaccgtcctatggagtcagtagccactgcacctctgcagcatcagggctccatcttctttctacaaatctcacaagggtggctaaactccataatcccactatgcatagattgggcttaggatcaactgtgattctggtcctgcgcaacagagaagacgaccccaaccatctgcactttgagacagaggaactatgtggcaatcccacccagggcaaatatgctcttgagccagccaaactgctgaccaccctccacaaagcaggagaggtccttgagccactaagcagctgacatgctgccctatcagcagaatgtctatactcctgtgcccacagcctgagaaacaaccctgtggtacccactcccattgttgacatgcccctgtcctacccaaagcccccacacccgtgatcagggcctgtgatgcagcatcgtggctcacttcctgcagacatgcccttcaggctggctggccagctgtccaaccacatcccaggcctgagaaacaatcccacagggtgcccctggaaggcacactctaaggctgatccagtagctgtacccccacattgccagcctgaaaaagcctttcaggccacccctggccaaccaagaagctataagcccacatcctgaacctgagaaaaaccctgtgggccatgcttagcagacatgcacccaggccagctgagaagccatgtgtccatgttcagggcctgagaaacagcttcacaggctgccccaggcagacacccccccaggtcagctgagcagtgtgcctccatcccaggcctgagaaacagtcccatgggccactccaggacacacatctcccggccagccaagcagctttgtgcctttgttgcaagcctaaataacagctccacaggcttcgcctagaagacatgttcccaggacagccaagcagctgtgctcctgtgtccagggtctgagaaacagtgccacaggccatcactggcaggcaccctctaggctggccaagcaacaatgcattcgtgtccccacccagagttaacagtcccatagccccaaccccagtgagccaaaccccaagttggctgacccaccatgtacacaaatgagcccctgacttgagaaacagccctgtgcaaaagccacatgaccgccatcaccacctcttagcctaggccactgagacattcacaaatgtcactagcatttttttttttttgagaccgagtcttttctctgttacccaggctagagtgcagtggcatgatctcggctcactgcaacctccgtctcctggattctagtgattctcctgcctcagcctcccgagtagctgggattacaggtgcctgccactgctcctggctaatttttgtatttttaatagagatggggtttcaccatcttggccaggctgctctcgaacttctgacctcatgatccacctgcctcagcctcccaaaggattgggattacaggagtgaaccactgcgcccagcccgtcactagcatgtattacagctgaagaaacttacatagggaatacactaccgcatccacctagaacgaaagccaacacactccattgaaacaataccccaagacccatatgaataaatctttccctacagaacctactccatgaaattggaagaggtgattgtttcatcatatgtgtataaatcaatgtagagctgggtgcagtggctcacgcctgtaatcccagcactttgggaggctgagatgggcagatcacttgagttcattcaggagttccagaccagcctggccaaaatggtgaaaccctgtctctactaaagatacaaaagttagcctggcatagcagcacatgcctgtaatctcagctattctggaggctgtgggaggagaatcccttgaacgcaggaggcagaggttgccatgagccaagatctcaccactgcactccagccgacagagcaagactcttgtcaaaaaaaaagaaagaaaagaaagaaaaagaaagacagacataaagaaaaatgtagaaacacatgaaacatgaaaaagcaaggagcacaacacctccagaagaacacaataatttccagtaacagatgccaatcataagaaaaaatacaaagttctggctgggcgcggtggctcacgcctgtaatcccggcactttgggaggctgaggcgagcggatcatgaggtcaggagatcaagaccatcctggctaacacggtgaaatgctgtctctactaaaaatacaaaaaaaaaaaaaaaaaaaaaaattagctgggtgtggtggtgggcgcctgtagtcccagctactcaggaagctgaggcaggagaatggcgtgaacccgggaggcagaacttgcagtgagcctagatgatcgcgccactgcactccagcctgggcgacagaacgagactctgtctcaaaaaaaaagaaaaaaagaaaatatacaaagttccagaaaaagaatttaaaataataatcttaaggaaacagtggaattcaagagcatacagttacacaattcaatgaaatcaagaaaattcataatttgaatgagaaatttaacagagatataaaaaagaaccacacagaaaacttggaactgaagaatccaatgaattacatgaaaaatacaatcaagactctaacaacagactagatcaagcataagaaacaatttttgggccaggcgtggtggctgacgcctgtaatcccagcactttgggaggccaaggtgagtggatcacctgaggtcaggagttcgaggtcagcctatccaatatggtgaaaccctgatctctactaaaattataaaaaaattagttgggcatggtggcgggcgccagtaatcccagctactcgggagtctgaggaggagaatcgcttgaacccgggaggcggaggttgcagtgagccgagatcgcgccactgcactcgtctgacgacagagcgagactgcgtctcaaagaaaaaaaatttctgctctataacttcacttttaacattgtttagtttttttgttttgtttttgtttcgagagagaatctcgctctgtcgcccgggccgctccggactacatttcccaggagcctcggcgcgcacttccgcttctggcccctttctctggaggagctccgcgcgtggcgagtctgtgtcctccctgtcccccagagcagagaaccctctctgtgtctggacgggggaggagcagacgctggacagggtgtgtgtgttcagcagtggattgtcagacttggggtcccggctgctcccttttgggtctctccccgggcccgctgatctgactgtaattccttctgctggagctagggttcggccaccttgacgcgccccctctgcccccggagcgtgtctttgggttttgtgtgtgtgggagtggggtgtatgtgtgtttcttatccgagacacctccgggtcgtttgcttggaaaccggctgagggcccgcacagcctggagcatttggttggaaagtgaggcaggtagcgcccaaggctcctgtaccagggccaggttaggcaccaacgcgtcccttatgtctctgcagcctgcagtgcggtggaaccgttttatagactgacagtgtgaacgtgggaggggatggatatcagagacccgtttatccacattttcagagagtggtattgctccgatgtgagtgtaggcaggttactctctgtgtctcgtgttctttacctgtaatttgaggtttgttgtacctacttttaagtggtggttgtgaggattaaatggaattttgacatgcaacagttgacacagggccagacaccaagtaagggatcaatcagttgttgcttttattaatagtaggcatccatctgcccacttgtacgtaagaaggaaacacccaagaatgaaaagtagcttgttgtaggtcacccagccaactagcacataggggaaattagaatccaggcactcccagcagggcactttccaccaccctgcacttttgtattcatcaggcacaatatccttactgttgtctgtaactgtctatgttcccagtgtctgactctgcagggccctggtggtataaaggtactgagacttgcctgtgtttagggcttcctgaagattaaatggctgctgaagttcttgagtttagctttagctcaaaagatactgcgtcagactctgcgttctgagtagagtctcagacaatgaaaaaagaaatacaatgaaaaaggggaaaacttcaatccagaatctcttgccacagtttttggcaaaatgctggcaattcccaggaagatatgtggagaacggaaaggttgctacacccaaatagtggcgcaaaggctatgattatggaggattggacctgcaaactccagaacagaggtaagaaatagaaataaagggtcctgccattagccgagaatctgcagtatgcacacacaacctcattttagtttttctttacagcaaccttgtaaaatgtgtgtgggcagcacagagaccttgggcaagttaacagtttcctcatctgtaaatactgatttatggaaagcacctggtgtatggtgagtgtgcgaagaatggtagtgattttactaatattcccttttaatttgaaactctgaaaaaacaagataccttacttccgtactctttccgttataccacctgcctttctgaaggatgaggggggataagtcagactccttggaggaggagaaagaaataggtatggagaggctgatgatttgatttggcattatagcacatgggagagccttagtcccttgaaccttctatgagctcagggctagagctggggcctgcgtccccagggtccatggccctgctgctcatttctggcagaattagagactgctccttggctctctttcagttttctcttaaaaagtgctttctcttaaggagatacaaagggatgccccagattagaagggacttccatagtctatctctagtctgtttgactttcctataatatcctgccctcaggccctctgatttctggaagtcctggaacttaggagttcctaactctaccttagcccccactgactgtcagtgtcgagtacagggaggggacaggcatcttgtggggaagttgggatttgggagtatgaccaaacatattgatcatacctttttttcctcgtaaaacaaagtatagaaagaaagcaccataaagtcttggttaatgttgatatgcagaaaatattgagaataataattaactgatgattaaatgacctttcctgagtgcttattctgtaccaggtactggtttgggccgtttatgtgcattaacgcacattgtagcaacgtaggtaccattattaatctcttttgtaaaattaggaaactgaagcccagaagaaacttggctatggttacacagtgccaggatgtaaaggcagtaggcaggcagactccagagccagagttccaatgacaaaggattacaggaggcatgaattctacaaaattgtgaaaccctgtacttggtaataactgaggcctgaaagaactacttcttcccccaaacaaatccacaaggaggtttaagtactgctttttggagatgggtggagagaggattgaagaaataataaactaaaatattaggaaaatatagaatgatatgtagaataagataaatagcatgtaaccctactacctagagataagcgcaaagaaatgctcaaaggtaataggatcagcagttctctccctacaagtaaaaaaatcaaaatggagaagtaaattatgagcagaaggttgcttgttgggcatagaatcagaccaagggaatttggggctcattcattaattcattcacaatacttagggactgctgtctgccaagtacaccgtgctcagtgcttaggatgcagtggtgaatgatacgacacatacaatttagtggagcgtgtgtggtgttaacaggcctgaggtggccacagactcaccgtgggcctggaatactcacgatggggtggctaaaggtgtctgtgaccatgactgctggggtgggcactgctgtcttttgctgctgtgactccctttttcttgttctacaaaattggtcactttctccatttgtgaataaaggagttgagcctggaggtctttaagcacctctccaactgtaacattgcacttcttgttttgttttagggttttttggtcccagggaacctcgttttcagagcagtggctcacgcagatcctgagcccagttaatggtcatacctttccctaagtttatgttcattctatcctctgagattatctttgaagtctcattacatagatgtctgtaaaatccttcaagctatgggcagccaaggtcagaggcacattttctcataagtggctgtttctaaattcataggtttgagatacataaagataaaccaggttcctttatgtcaatttccttccagttctgccctctgaggaccctgccctttcccaaaaggggtatcttaagaaggaaaatatggctgctctttgccggacagcagagtcccaggtgagttggggattctcctctcttctcggaaattttattttaattgagttggggattttcctctcttctcagaaatcttattttaattcctgaagcaaatttttttctcttagcatgaagcttgtcaaccacattagccacagcagtttgaaaggaaaggatcaagcaggtgggatggactgccaacgggatggtgtttgagtgttcctcagttgtatgacagtagcagtgaaggtcaggaggcttggtagcctcgcccatcagttggcagtgtggagaaaggatggtgggggcaggatgggaatgaggcctctttagcagataattgaggagcgtgactcctagaacatggttgggtaagaatcaagcttctttttgttcacttgagacatttggcgtagatatgcaaaggcacgtgaggcatttcttgcttgcatctgcttagaatattttggggagaaaagatgtacacaaatctgtgtggcacaaaccagcagatttagtattattaaatagggccttattattaagggcccttattattaagggcctactcaataataaagtgtcttagggaaaatgctgtatagacttggaggagcaggagcaaatgtgtctggctgagagagatttaggaaggttttattcattcaactagcattttaaagtccttttaagcagctcctaggctaatgaaagtagtgagatttgatgtgggccctgaaggctaagttgaaagatttatagaaagttagtgacataaatgacttagaatcgaagcaagatactgattcctctggcacaggaaaaaagtcagtacattgaaatcacggaggtgttgttccacaaaaacttaaaggcttcttatactcaaagttctttcctagatataattctcaagcttggcttatttcttttttttttcttttttttttttttttttttgagatagagtctcgctctctcgcccaggctggagtgcagtggcgccatctcggctcactgcaagctccgcctcccaggttcacgccattctcctgcctcagcctcccaagtagctgggactacaggcacccgccaccgcgcccggctaattttttgtatttttagtagagacagggtttcaccgtgttagccaggatggtctcgatctcctaaccttgtgatccgcccacctcggcctcccaaagtgctgggattacaggcgtgagccactgcgcctggccagcttggcctatgtcttagtttcttacttaccatctgtctctctcaacttaactgaagataaccttaaggccagctgaacaataggcttgggtgggaaggccacatccttaatctgacttttttttacagggctaaatcagtttgtttagttaacaggtgtaatgggcctttattgctcaaagctcttgttagacttacttcccactgtatgagatctagaaacagtttgcttttccaaccacgtgaggcctcagatttctgcactctattctcttttgttttggcttgaaaattgacacattgtttcctgaacttaactcattctttgttcgccagacatatccaggagcattctacacaaagagcattctggcgctttccaacctgttctagagccacaggcccagtgagcatttgccctgccctcatagttgctaattagtttgccagtgtatattaagagtctgcatctgttggctggatgcggtggctcatgcctgtaatcccagcactttgggaggccgaggtgggcggatcacctgaggtcaggagtctgtcaccagcctggacaacatggtgagatcccgtttctactaaaaatacaaaaaaaagtagctgggcgtggtggctcacacctgtagtcccagctactcatgaggctgaggcaggagaatcgcttaaacatgggagatggaggttgcggtaagccgagatcatcgtggccactgccctccagcaacagagtgagactctgtctcaaacaaaaaaaaaaaaaaaaaaaaaaaaagagagactgcatttctccagtcgtaaatattcttttctttgaagcttgccacctgactgtcaatccaatgccacctgtgtatttgaactttttattatgatatctcccacttgaaggtgctgatttctgaattagtttgggttggcttactaataactgttgtaaccaatagacccaaaatatatatggccttaatacagtagaagtgtattgtttgctgtcatagccatgtgactgggtatatagattgataggatggccattcagggacctgagctacctgaagctctagcctctttaccacatggcttccaaactcactctggggctcatggccctaccagccagtcagaaggggaaaacagcatggaggaatatacgtgagtcaggcctggaaagggcgcacatcacttctgcttgcattccattggttaggatctcatggccaggtctaactacagaggaggttgggaaatgtttgtatacctagaaaggagaggaggaggtatattttcatggacagttagcagctcgtagcactgttctcaaacatttaggttatttagaacgattttgctatttttctactgtaaggtataaatagatgtgattctttgtttataactctccgtatttctgatagttttcttttttttttttttgagacagagtctcgttctgttgcccaggctggagtgcagtggcgtgatctcggctcactgcaagcttcgcctcccgggttcacgccattctcctgcttcagcctcccgagtagctgggactacaggcgcccaccaccatgcctggctaattttttttgtatttatagtagagatggggtttcaccgtgttagccaggatggtctcgatctcctgacctcgtgatctgcccgcctcggcctcccaaagtgctgggattacaggcgtgagccactgcacccagccgatagttttcttataattgagttctgtatataaaattactgtaaaacaaaactatcaaattatgtcaagggggtatacgcattttaagattttaagattctttaatatatgagtcaataaaatcttgtctttgacactgcgaacatagtttaatctatttcctctccatcccatcagtctcccctaagtatgcctcatttaactttttcttcagaaccccatgcaggtgtttcagggctttacgtcattcaaggatgtggctgtgaacttcactaggaagaatggagagtactggaccttgctcagagagtcttgtacagggatgtaatgctggagaactataggaacctggtctccttgggtaagcttgggtccttccaccccagattgacctttcaggatacctttgccttctaaagattcccttgcttctattaggggatgataacaaatgaggctttggttattttcccccacagaatccagatcagatccttaaactgtttctcaccctacttgggtagaaattatttaattgcttttgacaattagttatttcattttctcctctctaaaatgcaacagagtgggactgagaatagagtggtcctttctcttttgaacttaaaattacattctgtttgtatctcttgagtaggatttccattttccaaacctggtatcatctcctagttggaagaagtggtaggcccacgaacgcaaatgcaggagggagaggtgccaagaagcagctgtacacgtaagtgagaacaaggcggattgcatctttagaaataagagttaggggttcttccgaaatcctccgggcctgtagaaaatgttgaatccccctgcagtctcatcttcacttgaccacatcagaatcctaatagcttgcctctttatttctttccagactgaaggaagagatacttcctccttaaagttataagcccaacacatgatccagagatcagctttgtgcctcatcctgaggcattttatgaggctattcccgtttcctctttagtagctggaatcacttcttcatttactctgtccttatcctacctagttttctgctatataagaaatatgaagagaaggaaagaatttgaataattttaaggatataaaattgacataatttgttgtgtagatttgagaggtgagggagtaacaaagaaaattctcaggtttcggccgggcgcggtggctcacgcctgtaatcccagcactttgggaggccgaggcgggcggatcacgaggtcaggagatggagaccatcctggctaacatggtgaaaccccatctgtactaaaaatacaaaaaattagccgggcgtggtggcgggcgcctgtagtcccagctactcgggaggttgaggcaggagaatggcgtgaaccccaggaggtggagcttgcagcgagccgagatcatgccactgcactccagcctgggtgacagagcgagactccgtctcaagaaaaaaaaaaaaaaagaaaaaattctcaggtttctggtctggatgtgtaggtgaatggaagttctcttccctgagatggaaaacacaggagaagtagcaaatttagggagtggaagatgagttcagtttctcttaagttgtttgaagtgtctataataagtctaaaccagtggttcttaaccaggggcaagtttgccccccaggggacatttggcaatgtctgaagtgtgctatgggtatctcgtgagtggagtccaggaatgctgctaaacatcctacaatgcacaggacggggccccacacaaagacttgtctgtctaaaacgtcaacagtgctgcagttgagaaaacctgctctaagtggtaatgtctggaggctagatgaatataaggatgacatgccaaatgtatcttagtaaaggaaagagatcttaactggtggtacagatttgggagttgcctgagaatggatgaaattgaagccatgggagtggataatatcacccaaagagcacaaaaagagttacaagagagcctagaactctaacgaacacaaacattcaagtatctgcaaaaaaaatgtatatatatatgtatagtatataatatatatatttttatattatatatgcaaatatatatgtatatacacatgtatatatacgtatgtgtatatacacatacgtatgtatatatacacatacgtatgtgtatatacacagggcttctctccagtgtggatcctctgatgttgggtaacatgggcgcttctactgaaggctttcccacactcctgataatcaaatggtttctttccagtatgaaccctctgatgctggataagagatgaactctggctgaaggctttcccacagtctttacaggtgtagggtttctctccagtgtagacttttgtatgttttgtaagagttgagctctggctgaaggcttcaccacattctttacacttgtagggtttttctccggtatgagttctgtcacataaatgtggcagagctttcgtgtagttcagccctcattagacaccagagacttcacagtggagaatctccctgaatgtctggacaaatccactcagactcttcattttgttaaatgccaaagaattatacttttataggttgttacagtggcgatgctttattatattttaagggatgaaaatccctcctctcctaccccggttattttctcttgcaacaaatccaagtgaagaaacactgaactgaaatctggactagcctaatagactctaaagctcaatttttatatgtatatgtgtgtatttttatctgtacctgaaatgactgctgtcaccatgcagtgattttaccccccttccctggcctcaggaataagccaagaaattctagttgtgcagaactgagcttgttgccccttcttgtactgatggaaatagtgccatgtccaaacaaaataaagaagctcatagctaattacatatcctaataccaccttcctataaaactttgccttaatctgtagtcattcctgcccccagctcataccctcctgtgggcagcttttgttcgctttacctcatcccactgttttgtgatcaccccccgggagatgagggacccagttaataggccagatgtcaagactgatgacatttcacacactaagagaacttgaaagtttactattcatacacagggtttctggggagagcaagatagatgaaagctggtccaaaatggcaagaacagagaggaggctgggcctttaaagtagctagggagtggggctggagagcattcgatctgtgggcttgagggattcaagcttcctgccagtgctgggagctcaggagatgcccatggatttctttatctaaagcaccaggtgtgcggtggggcagtgtggaggaggggagaatagaaaatggtggaaacttaaatgctgtcaatggccagacatcaaaaatggggccaaactctgttacatctaccttttcagaaatcttttttcacttatctcaaaatagctctttaatgttattgtgtcttttttttttttttgagacagagtcttgctctgtcaccaggctggagtgcaatggcatgatctcagctcactgtgacctccgcctcccaggttcaagtgattctcctgcctcagcctcccaagtagctgggactacaggtgcccgtcaccacgcccggctaatttttgtattttttgtagagacagggtttcaccatgttggccaggatggtctcaatctcttgacctcatgatccgcccgtctcagcctcccaaagtgctgggattacaggcgtgagccactgcgcccggactattgtgtcttccgttgatgaggaatctattttgctttttccatctccactttcttagaattttcttttttttccctttccttaagcctgaaattataacagttctcagaaagtaagaaccatttaccttggaaactgtcagccttacatagtaactattatgcaatcccaacagaagagttagggaagattgagtcaacacttttagaaaacattaaaaaaaaaaggtcatatgaatttgtatcagactatcaccagattaagttacttgaggctgcctgatgaaaattcctgtatatggctctaagaaattttatgtgtacctaataaagccaggcattattttttggttgctgtgactcaacacttacatgcaaacttttttttttctttcaaatcttcctaagcttaaattgatgttagagtcacttttttggtttccatgaattattttccctgccttttttttttcttcctgttttagatgcatttcagttacctgagagtaatccaattgtataggattggagtcccttgactttcccatatcattcccagtgtactagccagaacctgagatttccctgctttctatttttctcactaaaagggctattctgaactctctcttctcacctgctttcctatccttctcttctgtttaaagaagtcggtgttagtacagcttgaaattcaatagggcttgaattacagaaggcacaactgaagttagagaagaaaggatttttgttctgaaaattagcggtgagacagaccactctgaataaatggtgatatctggaaataatttttgaaatgcccaaaatccttcgtaactttaagaaattgaaaaggggtggggagggtcgtctataagagtgtctgtcattagaataggacttcttaaagtaatgtttgttaacaattggtaacaaggtcatttccaaacatagttcctggagccagttggctttggattggtagaaaccattgttgttccttcagagtcctcatctttggtaatttattttagaacaaaagactgaagacagatgtccttgaacaaaaggtctgtcctctaatgggtggattgcatgaattcgtggattgtactgtagtgaattggtataattctcttgtagcctaaatataatttggatccagaaatattaaaattttgaggacattatagtgatgaaatatttgaaatcagaacagttctagaaatgttatgactctgggacttacagagccttttttgttttgtttcagtttttactctgactgtactgttagtagtatggtctatgcttgtgctctcctctcagatttgtttgtttgtttgtttgtttgagacagggttttgctctattgcctgggctggagtgcagtgacgccatcacagctcactgcagccttgaactctcaggatccttgatcctcccacctcagcctcctgagtagctgggaccacaggcaagcgtcaccacacctggcaaatttgtttgtattttttgtagatggtgttttgccatatagcccagactggtcttgaactcttgagctcaagcagtctgcccaccttagcttcctgaagtgctggcattactggcatgagccgccacgcccagcatttggatatttctataacagggttctctttcgtgggctgtagtgtagaccacacttacccttcatgatggagaatataattcctctccttttacaacctaagctaaagctcagtgtgtttgtttggttgtggtaaagtctggggtgggggtttgatttggggctttagatagtaaatgttctgatattttgatctctttttggtaggtaatctggattctttagtttttaaatcatgagtgtctaattttctaacttatatgttaaaattgcctgtatgcttggctgatatgtgtccagtgaagggaaaattaatttatatgttaaattaattcctccaagcaaattatcctgaataatttgcactgttgtgataaactaactagggtgaccccaggcttgatttgaggattgcaggaagagatatttagtgattaaagtagggctttctgtcttttcggaggaagcgttaatactttttaggttttctttaagttaagaggcagttgtcacgttatcactcttttcattttgcaagttagtctcctttaggacccagtttaaggtatcacctccaccctcacctcttggccactgtaactgaaaataatctcctcctctgaataccagtgctgcttacttactatttatatcactcacatatgcctatgaaacatgacaattttggtttgatactaatatctggccttattctcaattttaacatcatcagggatcatgattttaacatcattatcatcatgatgagggaaacctatctttgtttagggcttttgttgctgattttacacaaaataatacttgcatacggttaaaaaaaccacgtgaaatagagtttttcaatgaaaagtcattcttctaggaactttgacctgttagatatatatcgtatatttgatgactgctgggtatgttttgccaagagtcatctatgcaaaatacagtggcttgagataaacatctcaggaaaaatcatctcatacttatattttacttaacaagaattaacccatatgcaccaagatatccccccaaaccaaaagataaattagtgtaattaagaatactataaaattatgttttgcacacctatataaaattctatatttatctatttatacatgagttattatcagagctatacacaaaactaggtgtattttatgggcaaattcaaggatttttaaagacaatattggtattgccctgttttcatcttacatgctgactacagaagtaaccgtgtgtaagagcacgacttcagtgaatctagaggcccagtcagttcattcgtgtgctagtttattcctcttcctgagtgtttttccttggtttgccaaagttgactgtatcagaagatatgccaatttatcctagtaggaagattgctaggtgaataaagaagcacttcagattaatccaagtccaaaaaaactccacgtaaccttaatcagcttcatatattagtcctggaataaatgtgactatagtgaaagtgggaagacattagacaatattcatctgtatattattgatatcagatgatgcacactgacaaaaacaaaaccctagaaatacagtaactgtatagtgaagccatggcttaggattctttgcttattcagtatcacggttttaataggaccccaacactagaaattaaaaagattccagtaacaccaacctaattgtatgtagaataatcttcagtggagaaaatacttacaattgtatagaaagcctacagtggatcatttgtcatcatccctgttcatagattttagaaccaaagggaactttgaatatataatatgggccttttattttgcaagtgaggagatggagatctggaaaggttaaatgatatgcccgtgctatttggggtgagggcagtggatagcggagctgagcttccacagacctcccaaccctgcataaaaaaaagaccttctttctgtgacatgtagaccatagagagcatctgggagagcaatgggcatagggacgcttcgacgtgggagaaattagcggctgattgagggacaggagggagctggtttacatttagtggtagttattgactggagcactgtgatgaggccatggtacagagtgctttgaagtcctgccctgggcctgggaatggagtctggatacatgtgacaggctttgcatccttgttgcttctgccctgtggcaattggggatttactggatgaaaatgggttttcttgttactgaatttaaactgcagaatatcttcaagctatgaaaataattctgtgtgcatgcacctgtgggttagaacactcattctaactgacatgagggaattatctcatgaagactttacctggtgtgatattcttatgagtgaatgaatgaacaccttttgtttctctactttgcactcacaagactcattctttcacattagtggttctcaaccaggggagattttccccctccaggagacaactgccagtgtctggagacagttttggttgtcacaattgggggagggggtgttactggcacctagaggatagaggcaagggatactgctaatcatcctacaatgcacgggacagcccctacagaaaaggattgtcccagccaaaacggcagtagcactgagattcaggaatttttagataaccaatttactgtggcagtatatccccacgaggtggcggtacagcctcctgctgcaatgttaaactacagtagttcaccgtgagcagttgattgtaatagcgaatctattctctttttcaaaaagtacacttaaacattttttacattacaaaagtgaaatattctttgtgacagaatcaaatagtatactgtagaagtgtataagtaaaagaaagggcttcctgagttcccccttgaaatcctaccctttagaattgatgtgtatctttttagattcttttcttgtgcgtgtatatgtatgcatgcataactagtagtgtactgtttgtttttcaactcacttataactttcaacattatactttagacatctttaaaaataatttagaggtatctcattttttttaatggatgcattgtgttctgatgtatggatgtcctataatttctatatattcttattaatgggcatttgggttctttccagttttttttcctgatacaggcaattcagtggtcatgccgctatttctgtaggatagattcctggaaatgtgagagctgggtcagagtacatttaaaatattgatgaattggctgtactagtttatactcttaacagtgtagcagagtgcctttttctctcccaaacattggatactatcaagattttatttttaatatatattttattatattttattcttaataatgttgaatgtcttttcctatgtttattttttctatgtttatcagttatttgtagttcttccatgaattgcctattcatttcctttttccatttttcgttgggttgctttctttttatcagtttggagtagttccttatacattttgcttattaatgctttgtctgaagtttctttttgaatatgggataagttaaggataacatagctagccaattgaactaactgtccttattgaataattcctccctttctcactgagttgaaatatatacgtatatgaatctgtttttggactctgttccatctaatgctgcgctagtttcacagtgttttatttattgtggcttgtagctggttggtgaagaaggatgggaagaatgtttggtggtgtgttttcatgtgcaaaagtgtgttttcgtgtgcaaaagcctagagacaggagaaaacggcgagggactgaaggaaggccagaggctaaggaaggaacgagggcctgaggaggagggggaatgacgctggagcacaggtggggctcagatcatacaagaccccatgggccattttcaaatttggatctttattcttagagccatggaaagattttaaccagagaagtgacatgatcagacttatattttttgaagctttctttggacttcggcttctggctatgatggagtaactggtactaggctagccctcccaccataaactgctatacaacatgacaaaatagatgagacaactattttcaggcagtgaacaataggtagcacagaatactgatcccagacagagggaaactcatgaggtgaaccccatgatcacccaactttctgtcttagaactacttccaaccatggcgcagatagctggagtccatgtagagcacagtggtcccactgagtggaggatgtggaaatcagggttcagagcagcggaagcagatagatagtgcggggtgagatacagagaggagggagttgtataagagcgtacacgagtacatggataggtcccttgtaaaccgaaggttgagaggcaagctgaacatgagctaggtgagatcactcaagggttataagatagtggctactgtggggttgagagtggaacagtgtcctggtgggatcctgggacatataaaggacactagaaaaaaaaaaagaaaatctgagtaagtatggacgtcagttaataatgtatcaatattagttcattaattgtgacaaactatcatagagtaacgtaagatgttaacagtagaggtgttgtgtacccctgtggtagaaagtttgaagggtcttatgtacccctattgggtgtggggtatataggaactctttaaaaaagagtttgatctaccatggtagagaatttattctttccatagaaatgatggaattcttagatgaagaagcattcaaagagaagtcagccaaaacatataggaagaagaaagtatcatagatgtgtatcaggaagttaattgataaatattctctctgggggaaaaaaaaagctacttctgcttgcatcttacacaattgcacgtgtacatttttgctggaaaacaatcagaagtcatattttgttatttagaatgttataaagtcattactcgagagttgagatataatgaaattaataatttttactgttgttatcaagtacattcttaaatgaaactggcttctttttaaaatttattttcaatttttgagtgtgtggaaaagtacaatgactgctagcacagtttggtgccactgctttaatatgtgctgaggcctcagcaattttactcactattgctcctgcatcattgcgcaaatgacaatatggtgaaaatagcaaagaatactcaagtgttatcatgaaaatagttttgacctcacacatccctgaaagggtctcagtgaagcatcaagggtccatagatcttgcttttagaaccactgggtaacagcaggtatctggagtttatgtaagatgaaggaaggcaagactctacaaatactttatgcttttagacttatcccattcataagcctattagttctgctccatccaccaccccctgctcaaggcagagattattagactgaataaaaaacaagacttgcttacatgatgcccataagagatgcattttaatatcaagagccaggtaggctggtaaaaggatggggtaaagataataccaaatagcccaaatgtataacaaacccaaatgctcatcagcagggtaatggatgaacacgcttggttacagacatagcatggaatgctactcagcagtgaaaacaacaggctactgatacgcaccatgacatggatgaatctcatagatgttttattgagtgaaataaggcagacacaatagtgcctactatatatttccatttatatgaagttccagcacaagcaaaactaatttataatgataaaactcagattcttcgttgcctggaaccaggcatggtagaaagattgaataaaagggcatgagggagcttcctgggtgctgccaatattctctatcttgattgggtggtggttaccagaatggagttatttgtcaaaactcattcacctggatgcttaaaataggtgaattttattgcatgtaaattatacctcagtaaagttgatttttttaaaaacctttctctgagggtgggtgcagtggctcacgcttataatcccaacactttgggaggccaaggcaaaaggatcacttgagagcaggagttcgagtctaacttgggcaatacagtgagaccctatctctaaaaaataaaagtaaataaatacataaatgaaaagctttctctggatgcagaatggagaatggattggcaaaagcaatgagtagatgtaggaattctagtgtggagcctattgccataatccaggcgagagacaatgatggcttggactctaataatagcagtggaaatataaagggtaaagggtttggagatgtgtgagatgtaaaatggtgatgggatggacatgggttgtgacggaaagagaggaggtagggatgctccctgggtttctgatttgtaatctagttgggtgctggtggcaatctctgagaaaagaaccatgaggagggttaaatttgttgtggtgggatctagggaggccttacatttaattttggatgcattagattcaaggtgcctgtgagaaagtcaagtctttatacttagaaattagttggatatacaggtctgaaagttgagctgagacatcaatttgtgagccataaacaggtggtaactgaaggcgtaggaatggatgagctcatctaggaagagagactaagttgggaagaagaagtgatcttgagttgagcttcaaagagcctctcaccttttcaggcagaggaagaggaataagaaaattggactgaaaagtaatggccaccgagatgtgggcagccaggagaacgtgttatcacttgaatgttacccattcattatctggtttcccgatacactgtgttgttttctttctttatttttttattctttttattttttagatagagtcttgcactctcgcctaggctggagtgcagtggcaccatttcggctcatggcaagctctgcctcctgggttcacgccattctcctgcctcagcctcccgagtagctgggactacaggcacccaccaccatgcctggctaattttttgtgtttttagtagagatggggtttcactgggttagccaggatggtctcgatctgacctcgtgatctgcccgccgcagcctcccaaagtgctgggattacaggtgtgagccaccacgcccagccccctttggttttaagagcagctgatcttgcctgctggctgccaagtcttctcaccttctctgaatctcaggcttgctatgtagaaatgagaccatgtgtatgtgtgtgtgtgtgtgtgtgtgtgtgtgtgtgtgtgtgtgtgtatgaaatctggactccttctatgactgcctttcctgtttgttctgacccatgaagcaggtatggttctttcgtgttcctcaagcgtatcaaatgttactgagtgcttcctatcgctaagtgctgggctgcactgtctagcctctaggagcttggactctaatcaggaagccaaggcacataccctaactccacagagtgccaagaggctggcacggtgcaattactgcacctttggaaccaaccctgggagcgaggtcagtgcaggttcctaaggcaggaagacctgagctgagccttgtcctagatctttggagaacattaatgccaggccacgatgctgaacctcagcatcagtcccagaaagttcaggactggatgctggctgcagacacagtctccatggtgagcaagagccaagtatctagagccaaaagtatccacgctcatctggggagtggttaactggcatcactcacagcctgtttgctggcagccgaaaggtggatgataggtgtatgtggccacttgggaaaggaattacttgggccgggcgtggtggctcacgcctgtaatcccagcactttggcaggccgaggcaggtggatcacctgaggtcaggagtttgagaccagcctgacccatggtgaaaccttgtctctacttaaaaaaaaaaaatacaaaaattagcctggcacggtagcaggcgcctataatcccaactactcaggaggctgaggcaggagaatcgcttgaacttgggaggtggaggttgcagtgaaccgagatcgcgccattgcactcctgcctgggtgacagagcaagactccgtctcaaaaaaaaaaaaaaagaatttatttcagccattttggggaatgcccaggactcagtattatgtaacttgtttttcttattctcccaggctgtaagtattttgagagggggcagtgtgtgtcctatgtgactgagctggccatatgtactatggtgaattctgagcacctgaccgaggcatgcagtcagcgtccaggtggactctagttcttccttctctagaaaggctaaccctgtgtgcttggaatacaaaggaactggcacagtctgggattttttcttctctcttcccactctccctgttcttcctatttttcatctctaacatgacctggctgccactctttgtgtgccacctttgccctgtagcagaaggaacccttctgttagcatatttaggtagtcttgcaccagatgagaagctaaatggcttgaatgacttgacaaagcctatatggccagcaagtggcaggtcccaaaatatttcggactccaaatagtgtgcctttgacacatctgtcattgtcttgctgaagcaggcagagctctgtgtgccctgccttccagaactttctgtgctcatgggcaccacagtcccgcttctgggcagggcccaccctgacctgagatgtgtgtgtggctgacctcttgggaaaccctgaagccagtgtctgaggcaccccatcattttcaaggaacaggaataactggagaaacaagtctttcaaagtggctccaccttttgaggtaactgggagtgcattttcttggggtgactcagtcaggaaagtccccgattatgtacttaaggagtccttttctctccttttgtggtagtctgcaaatagcagagagaagcccctcactctcgatgctccctgggtacctccctatggccctgctgctgccgactgcttcaacacattcttctgtccctgctgtttagatgtcgtgttgtaggagcctgttgctaaggtgtgttctgctgtgtcttccaccacctttaaacaagcagctcatgttccttttctctcccctggaatgggtcactgtgtaagcctttttcatagttcaagattccaggattgcccccaaataggccagacccacccccactccccactcccaggcatcacgtctcaggtatcaagggtgagaggtcactggggccccctcagttccactctcagtgacctggagcctgagcaaacatttcctgccttctgcagtgtcctggagaggcgagtcctctgcccgcagctgcttccctccccagggggcctggaattcccccagtcttcagtggagaatggagagacagtttatgccctctgagttctattagggcataatgactcgcagctttaaatgcagacagaagctattaaaagcagtgaaagcgattctttttttttctttttctttttgtatattgcccttttggaagtaggaaagtgacagggtctttgaggtttgcaaaggtttaagtgcgccttggcacacctcttggcggaaggtgtttagtgcatcccaggaggcaagattgaagctggggccaaagcaggcaaacctgaggtttttgggcaggcacttgcctgggctaggagggctggctctgccttcgaatacagaacatgaatggaaagcagccatggtagcaggagtaataatgatgatgatgacgatgctggcacccactgacatttatggagctcattaataatgtccctggtactatacaaagttcttattgacatacgttatctcattagtccattctttcctaatcctatgaagcaaacactttactgagccccatctcacaggtgaagaaatggaagtttagagatattaagttgtgaaataagaaacaggccaggcaccgtggctcacgcctgtaatcccaacagtttgggaggccaaggcaggcggatcacaaggtcaggagttcgagaccagtctggccaacatagtgaaaccctgtctctactaaaaatacaaaaattaaccgggtgtggcggtgtgtatctgtaatcccagctactcaggaggctgaggcaggagaatcgcatgaacccgggaggtggaggttgtagtgagccaagattgcaccattgcactccagcctggacgacagtgtgagactccatctcaaaaaacaaacaaagaagaagaacaacaacaacaacaaaaacttagatttggtctctgcccccatttcctggcacccgacagctcttagaacccccagactctctgaagtggtaagtgtctgaatgccagtgagatgactgggtggctgaggggggtcccgagagcctcaggatgggggctagttgccaaaggagccaaccctatgatgaaagggtttgactttcagccccatctccctgatctcctccagggagggaagtgaggctgaaggttgagaggatcaccaatggccagtgatgtaatcaatcatgcctacatcatgaagcctccacataaacccaaaaggcatcaggcgcggtgattcacacctataatcccagcattttgggaggccgaggtggaggcagatcatttgaggtcaggagttcaagaccagcctgaccaacatggtaaaaccctgtctctactaaaaatacaaaaaaattagccaggtgtggtggcacatacctgtagtcccagctcctcgggaggctgaagcaggagaattgcttgaacccaggagacagaggttgcagtgagtcgagatcgcgccactgcactccagcctgggagacagagcgagactccatctcaaaataaacaaagacacaaacccaaaaggctgggcttccgggagcttctggattgctgaaggggtggaagtccgtggagggtgtgcaccctgcactggagagggaagagaggtgtcacttccctcccacatcccttgccccgtgcatctcttccatctccaagtagggagtgtcagaattgagttacatcttaggacacccagctgttgttggagaatggcttcatgtggaaaaaaacccacacgttttagttatgaaagtgttctgtgttgtgtgactataagacaaagaaagtttgtttttcctattcataagtaaatttggccaaagtctcaactgctaagtaaaaaaaatgtagacttcccacttggccatctggctccaaccctacactccctgtttggctcttgtggggtcagcctaggctcaactccattgatgaacttggaagcatgattttatcacctgtacatttgaaataataatcatgtttacctatgttgacaaaaggagtcaaactctgtaacatatttgaagatattcatcctgagccaaatatgagtgaccaatggtctgtgacacagctctcaggagaccctgagaacatgtgcccaaggtggttggggtacagcctagtatacattttagggagacatgagacatcaatcaaatacatgtaagatgtaatttggtttggtctggaaaggtgggacaactggaaaccagggcttccaggtcataggtagattcaaagattttctgattggcagttggttgaaagagtcaagttattgtctaaagacttaggaatgtctgggttaagataagaggtggtggaaaccaaggttttatcatgtgggtaaagcctccagggaggaggttttggagagaacagattgtaaatgtttctaatcagactgaaagagtctgctgtatcagtaattccaaaagggaggaagttataatgagccatgtctgacctcccttcccatcatggcctgaactggtttttcaggttaactttggaatgccctttgctgagaggagggatccattcagattgttggggggcttaggattttatttctggtttacagctagtatgggtatggcaaggatggtgtggggtaatccacaaaatgcttgaaatggtgagcagcacggcatccgtgctcactgtattttcgctgactcatgctgactgcagccccaggagggcacgggctcaccgccaacccttcgtgcctcccggctggtttctgagatcagccacagaagttaaacttctttccagggaagaagggcggggatgtcagggctggagagtgcccgtgtccttctgtgtgcattgggctccttcctccttaattctctgctttccacttttaggctgaactccagtgcacccagttagacttggagcggaaactcaagttgaatgaaaatgccatctccaggctccaggctaaccaaaagtctgttctggtaagaccagcctgggtcagccaggcctgtgagggtgtgggacgtggtactgcatgcctagcctccattcctgtaggttccttggggtttctccacaaatgagaattgtaggtacagttgactacaccgtggggtagcctcaccttgatgtcaggatttgttatgaaattagtttaagttttaaacctggcaagtgatttgctttttaataatataaattagaaccaagactaatcctgtaataacaacattcttatttctacatttgcttatgctgtcttgacagggtgtatgtgtgtggggggctgggagtttagtcagaggtccaaaaactatacgtaatcttggcttcttccattataagagggcgttctgcatgtgagtctcaccagtcctatgacctggcagctggaaaaaaggagttgagaactcaggattagtgatggtatttgagaaggccatggtgtgccaggctaagtaggcagtaaatggtctccaagtggattctgaggagttctacaaatgcctctcgtcagtggcaagccagtaaccaccactcagaagagaatgcaaaacaggccgggcacagtggctcacacctgtaatcccaacactttgagaggctgaagtgggtggatcacttgaggtcaggagtttgagaccagtctggccaacacggtgaaaccccgactctactaaaaaatacaaaaattagccaggcatggtggtgcacacctgtagtcccagttactcaggaggctgaggcaggagaattgcttgaactcaggaggtggaggctgcagtgagctgagtttgcaccattgtactccaccctgggtaacagagtaagactctgtttcaaaaaaagagagaatgcaaaacacctaccctatggaagtgaatcagcattgtcatctttatatcctgagaataaatgattccatccatcatccatccatccattcatctacccctaatgcatgtattcatttcaacttaattttcacctcctgggtgtttacaaccaactagctactgaaggatgaaacacctctttcttacccacaatatcttattaaaggaagaaagagaattatccctttaaagtcttataaaccttcagagataatggatttccaggctcaagataacctgtagaaccacatggagggtcttgtgtttcccagctctttaattttcagacactttgatccctcctcagttctcataagtacatgatgaccaggggagttggttattacaatagctaccatgcacaaggggcatgaagacatggagagatgacaatacttgtctagggccatctagattggtggaatgtgagaacctagagttgttgctcccttgacctaagaatgactcagtatattgataggcatgtacaccaccctcaaatctttaaaccattacctgcaggctccttgaatgtattgaggcctctcctctctgtactatttctgcttgtcatcattttcgtggtaagtaatgccctttgcacattacatttacatgcaagaaagaagtgtttctcaatgggagggtttaggaatgagggccaggccacagcagaagtcaacctcaatccaccaatatcatctgacacctcccttccactatcctttctcaggatggcctcagttggggccgggggtgaggatttggatccggagtttgtctttagtctcatgcctcttagcctcatgctatcgtgcttctatgaggaacttacaggtcataattgtagacaggattctgctcctttcccacaacaccctcatgctggttcccatgctgtgtcctgctcctgctttctggaggtcatcgggagcgggcactgcaggcagggagcactctgtggcctctgtgactcctagagcctggctacctggagcctgagtgggcatgaagggtgagtaagccggggaactaggacacgttagctaatgcagagcctggatcaaacaccaccaccaccatttgcccccgctcccaaatggttataagcaaaactctcctgtcttctgaggtagatttcttcatcattacttctttgccatatggaaatgtaatttgacttttagatttaaatctagtaatgattaatatatcagaatttacagtgtttgcaatgtcaaggaggcaacacctgtaaacagttggttcaggaattgctgggagtcttggcctctttccctcttggtcgcctgctcagcagcagcctgtgtatttatagtccattatgggcataggatgttaccctaactggtgcccacagtgaacaaggggctaagccctgtctctcgtctggtcttaggagggcttctgtttaatgggctgaacttaaaggtccttccctgcaacccccacacagccacagcccatgggctgaaagctcagctgaactcccattgtacctccccagctcatcctagtgaatgtgccagggcccagagggagaggtcaggctgtgccagctcagtgctatactgcaggcacatggatccccaaccctgggccctattttgaggcagtgtggagtggtggtcaaagggctggactccagagacagacagtcttggttcaaaccttgctgtgtgatcttgggcaaatcagtccatttatcactgtctcagtttccttatctaagaaatggagaccctaatagtacctaccttttagggttgctaggagaaaagtgcctggcacatagtaagaacttactacatgttggttgtttttatgattattgttatataattagaagagtgaccaggctagcagcagagagtcctcattctcaggagagtgggaagagggagagaggtgaagtgtcagagggctgcagagccaatacctggcagagccccaggcagcaggtttgccacttggggggcctgggtggggcccaggtagctttcctggttctcaggtcttcatttcagacagtgctctgagcctcccatccacagtccagagcccattctctgcctgcctccttctctactattgtcgccacctgcagtctttctgagcagctggttaaggtgctactattcctcctcccaagggtgagggccagccctgaacaaaagggctccggagggagccacaaaaccagatagcctcaggtttcccaaatcgcctctcctgctgccctggcttctcaacaccgtcacctgtctaaaagcttttcttggtgtgggctggaagaatttggataaagtctaccatccccgctcttccttaatcctattaccacagcttctttgctcccagctctgtccagctacctaacctcaaggaagccaacaggcgatggaaaagttggcataaaaatgagaatgtaggctggacgtaatcccacctgtaataacacctgtaatcccagcactttgggaggccaaggacggcagattgcttgaggccaggagtttgagaccagcctgggcaacgtagtaagctcctatctctacaaaaaatataaaaattagttgggcatgaaggcatgcacctgtggtttctgctacttcggaggctgaggtggaagatcgtttgagcctgggatgtcaaagctgcagtgagccaagattgtgtcactccaacctggcaacagaggagaccttgtctcaaaaaaaaaaaaaaaaaaaaaaaaagagagagagagaatgtagggggattgtctgtgtcttcccaccatccccctccagtagggataccccttgctttctttcccctgcttattcttccctttgccaccagattgaagactgatcagagaccattctcgtggagtgaattgctgagccctggcctaagccagggcctgagccaggcagaagacctatctggtgtcatcattttttcttcccatctccctccaaacctctaggttcccactaagcctgggcccagaatcccatcctttctgagtcctttccttactgtgctcccctttttgatctgggtctcattctccctccctctctccctctctccttccttgccagggatgggaggtgcccctgaagcctctgcccaaggatatctgctgtttgactcactttggagccctgatgttcagagcttgcccttaacattgggaggagaaagagaaaacagcacctggaggggtgctcagaaagtctcagatgggatagggctggagtgcagtggcgcaatctcagctcactgcaagctctgcctcctaggttcatgccattctcccgcctcagcctcccgagtagctgggactacaggcgcccgccaccacacccggctaatttttctatttttagtagagacagggtttcaccatgttaggcaggatggtctcgatctcctgacctcatgatctgcccacctcagcctcccaaagtgctgagattacaggcatgagccaccacgcccagctgtctacaccaattcttaagaataccagagaagaggaaaccttcagagcttggaaagatgttgtaaacatgatattgattgaaggcattcatagaggatgcttaccatgcaaaagagtccacatgcatgtcccccatcattcaaaaccttaatgtttctcacatgggttttcttttatattttatttgaatgtcacattctgttctgcatatacatgcttgtcctggaattgcttgggtgccatggtcatctgcaccctaaacattttatggggattctgtatgtggtagagacagtatcatcttagacatgcatttggctctgatggactcagtggtcagtttaaccgggcataatgaaatgctaagaaagctaattcatgctgattatacaaaaaaaaaaaaaagccaaattctttacctcttgaaatatgactatcaagtagactgaatacacgcattgctctggtaggaaaatcagtttcggaaacttgactaacaatcccagagtgtcagagttgtgagggatctcggaggtcatagaggaattcactgtctcatcaaatggatgaggagaccaagttaatacgtaaatcctttttccaggaacctggaattcacatgagaataaaggattccttttacaatagggaactgctccctaatatatgtgtttctgacatttctgtatgttgagcttctatcaagttggatgcctcactaagaaatgtttggctgccttccacccccaccccccgccaggtgtcggtgtcagaggtcaaagcagtggctgaaatgcagtttggggaactccttgctgctgtgaggaaggcccaggccaatgtgatgctcttcttagaggagaaggagcaagctgcgctgagccaggccaacggtatcaaggcccacctggagtacaggagtgccgagatggagaagagtaagcaggagctggagacgatggcggccatcagcaacactgtccagttcttggaggtatgggggttgtgggggcagaagcatcccacagctgccccatgaagcaccctctctttgctaggcccatggccatctgtgaatggaactgttttttgttaaatggtgtgcacagggagcagtgggaacagagagaagcagattcttcattcagcagagtataggaggggtagggagggagaactgctcagagcagggaagcttgaagcaggtcccggaagatgagtcaggttcaacgtgcagtatgttccaggtagagggaacaacatatgcaaaggcagagaggtttgaggaagcacagctgatttggggagccaaggtactttaataggggtggagcctggggtactgggtgcagagtgatgagactggcacggccaggcaggtgtatggctgggaagggtttcagatgggagaatgatggagtcagtgagtatgttttataaaccgctccagcagtccactgcatggaggtttgcttggtagggatgagactggagcctgctgcttttcagagagggctgtggctggagtaattgaggagggctcagaagagcaaatgcttttcattacaatgtatcattagacatcaaaccgtaagccattggaacgagatctaaagaacatgtaacctttcgaggaaggaacactaggttgggggtaagctgcaacatcctgaatctgtcagaaaacagctctgttaacagctcttcacatccctgagtctcaaatttctcatttatcaacaagcccactggagtaaataattcagaaggctccatccaagctctgatattctgaaatacaattttttcttgcttgcatttttgaaaaaattctctgctagttacaaaaaacaaatgtttattgtgaaaaacttggaaagtacaaaaaaagaagaaaaaaaatccataatccttacacaagtacaacatagttaacttttgaatgagtaaaagagaaagacagacaaaaacaccaacaaagcgtttgtcagtttctttgcttttcaatatcaaaacacaaagaaaatatgaataaccatttaataaccatttggcttcccgcctcacaagtttcccttaagatctacccaaagagtatataaattatttctcttttctcgttttgtaactttatttatttgtgtgtgtgtgtgtgttgttttttgagatggagtcttgctctgtcacccaggctggagtgcagtggcacgatctcggctcactgcaacctccgcctcccagattcaagcaattctctgcctcagcctcccaagtagctgggattacaggcgcccgccaccacacctggctaatttttatttttatttgtttttttttttttttttgagactgagtttcactcttgttgcccaggctggagtgcaatggcacgatctctgctcactgcaagctccacctcccgggttcaagcgattctcctgcctcagcctcctgagcagctgggattacaagcatgggccaccatgcccagctaattttttgtatttttagtagagacggggtttctccgtgttggtcaggatggtcttgaactcccaaccttaggtgatctgcccgcctcggcctcccaaagtgttgggattacaggcgtgagccaccacgcccggccaattttttttgttttttcgagacggagtcttgctctttccccccaaggccggagtgcaatggcacgatctcggctcactgcaagctccgcctcctgggttcatgccattctcccgcctcagcgtcccgagtagctgggactacaggcgcccgccaccacgcccggctaattttttgtatttttagtagagacggggtttcaccgtgttagccagaatggtctcgatctcctgacctcgtgatccacccgcctcggccccacaaagtgctgggattacaggcgtgagccaccgcgcctggccaaattttttttatttttagtagagatggggtttcaccgtcttggccaggctggtctcgaactcctgaccttgtgatccacccacctcggccccccaaagtgctgggattgcaggcatgagccactgcacccagcctgtaagtttatttttaacataaaagactttaatacatataaaataaattctagtgtatgataactatttattggctgggcacggtggctcacacctgtaatcccagcactttgggaggccatggccggcagatcatgaggtcaggagtttgagaccagcctgaccaacatggtgaaaccctgtctctactaaaaataaaaaaaatttgccaggcatggtggcgcacacctgtagtcccagccacttgggaggctgaggcaggagaatcgcttgaacctagcaggcaagaggttgcagtgagccaagatcgcgccattgcactccagcctgggtgacaaagcaagactatgtctcaaaaaaaaaaaaaaaaaaaagatatttatttattttggcaaaagataacatttccccccaaatttttggttaggcattcaaaacaagatttattgaataacttatccaaataacttatcctttctcccactgatttaaaatgctacttttgtcttgtacagtatatagcattaaaatgttgaattacccttttctctatcaattctctggttttgatttccatggctctatctaatcattttcatacaactgttttcattgctatgttttctgctgtacctgttctgctctttaatgcttcagttgcagctgaagtttgatactgtgttatatctgaaagcatctttcctgatcacacgttgtttcaaaacttacatgaaactatgtgattatcagtgtgaaaacactttccaaatactaaagcaaggtacaagaattacagaaatttatgcattggatgaaactgacaaggaagaggcagcactcctgcctgagagctcctccattttccaccatggcttgtgtttaaattgtcaaaaaacaagtactgacggcatgaacaaagcaagaatgttctttattttttggtccccagtctggactgtgtattggagctgttcatggccatctagtacatcttgatttttaaaatcccacgttctcacttcttttttttaaaatcccacttattctgagggtctagcagctagagaagtgctatctattttgttagaccctgagcttgacactttacatgtactttctttgtgaaggacacattaccgtcagcccattttacagatgcaaaaagtgacttaatgaggagagaagcccgagtttagaaatacagaaaccacagcaagttctgctgtttccttttctgcaggagtactgcaagtttaagaacactgaagacatcaccttccctagtgtttacatagggctgaaggataaactctcgggcatccgcaaagttatcacggaatccactgtacacttaatccagttgctggagaactataagaaaaagctccaggagttttccaaggaaggtgagacacattctgggccatggactatagtgagtgtgtctctagcagtagatgataggaaggtgagagagagtcagggaagggaggatgaaatcaggggaatgtctcattttctttttttcttttttttcttttttttgtgagacagagtcttgctctgtcacccaggctggagtgcaatggcgcaatctcagctcactgcaacctctgcctcccgggttcaagagattcttcttcctcagcctccctagtagctgagattacaggcacctggctaatttttgtatttttagtagagacggggtttcaccatgttggtcaggctggtctcgaactcctgacctcaaatgatccgcccacctcggcctcccaaagtgctgggattacaggtgtgagccaccgtgcccagccaaatgtctcattttcaaagccatgcttcagacagggtatgttactaatggactctcatcttgatgattttcttttacaattgagacccagagaaggacacttagtcatgcttatattatgccatcggctggcatttctgtgagtagcttcccaggttgctgatgcctatacttttaagttaaatccaagacggtctggatcactttttcagtggtttatgccttacctatgaaagaaatgtagtctattgagcgtatttctgtgaaacattaccaggcttcagccccttctttccccaggaagcccagggaagggtggctgggaagtcctgatttgcagattctcctgaccacctggacaggtgtgcattcacaactctcttgattttctagaggagtatgacatcagaactcaagtgtctgccattgttcagcgcaaatattggacttccaaacctgagcccagcaccagggaacagttcctccaatgtaagttgtgaacggcacccccttctccagttgttgatatcagtgcagtgctttgctaagtcagaaccgccatctctcatctaggtttcaggttcttgcaacttcatgtctatccctaaatgatacatttcttaaaatttaatttaaacaatttttttaacttttcattttgaaataatatgaaacttacaaaaatattacggaaataagacaaagaattcccatatatctttcactcagtttctcctaatgttaacacgttacataactaccatacattgatcaaaaccagggaataacattgctacaatgctatcaactaatctacagaatttattcagctttcaccaagtctttcatcaatgccctttttttctggcccaaagtccaatccaaggtcacagatgtttccatgtcttcttagtccccttcagtctggatcagtctttcaatccttgtgtttcatgaccatagcactttgaagagtcctggctagttaccaagtgattcatttctatgtatgacttggccagaattgcataactcattgacctatcattaagtgttattgacttggtccattagcatttttaaaacactgcacagttgacccttgaacaatgtaggggttgggataccaatccctcatatggttgaacatccacgtgtagcttttgattcctcaagaacttaactagtaatagccttctgttaattgacataaacagtcactaaacacatattttgtatgtttacatatatatacatgtagacatatatatatgtatgtatgtatattttttgagacagggtctctgttgcccagactggggtacagtggcttgatcatggctcactgcaggcttgacctcccacactcaagcagtcctcctccctcagtctcctgagtagctgggaccacaggcgcatgccaccacatctggctaattaaaaaaaaaatttttaaacaattgtagagatggagccttgctgtgttgcccaggctggtctcaaactattggcctcaagtgattcttccatctcagcttcccaaagtgttggcataagccgctgcaccagtgagaacttttttaattatgggattgttttaatagcctttaatatgctaattcatttggcaagtatatactgagcatcttctctgagctagagaagaatcccatgcaaaatgtgaagctcatagattagagggaggacaagcaggaaacaaacactcacatgaatatctattattacaaatggagaggggtgccaagtttaaaacgccatggtgctctgagagagagtgagttagagtcacaaagggcctcttcgaggacatgaactctcagttgtagcctgaatggattggtaggaatcaccagactcagagtagggcatgatcacatctcagagggaacaggctgtaccaaaggctcaaagaggattgagtgttgagtaggtctgaggtcagcacggtggaaatgtagtaatcaagggagagagtcagagacacaggaaaggaccagggacgtggggcctggtaggccagggcaaggggttgctgctttatcataagagcaaggggcaccatgaataactagaattattaagctagaataacacgactggcctcagcctacagctggaaacaagcagcatggctctgttgtggagaaggtcttgaagggggcaagagagaacagctaacgaccagtcagaaacccgctgaactagtctgagtgagatgagtggtggcttaggtcgggggtaaagcagggggctggagagaagtggtagaatccgtaggagttactgcttcctgtgtgtgtagtgaggataggggaagaggatgagggcaaaacaaatgtcagaaatgacatagagcttgacttgagcaatggggtgcatgagaccctattattctttgggagtgggaggagaatatgagggcgtgtttgagaattcttcatgctccatttgatccattcattcatttttaagatgttggttaaatattttaaaaaatgaatgaatgggccgggcgcggtggctcacgcctgtaatcccagcactttgggaggccgaggcgggtggatcatgaggtcaggagatcgagaccatcctggctaacaaggtgaaaccccgtctctactaaaaatacaaaaaattagccgggcgcggtggcgggcgcctgtagtcccagctactcgggaggctgaggcaggagaatggcgtgaacccgggaagcggagcttgcagtgagccgagattgcgccactgcagtccgcagtccggcctgggcaacagagcgagactccgtctcaaaaaaaaaaaaaaaaaatgaatgaatggatcaaatgtgggtataggagtacctgcttccccaaacacttgccaacactggataggataatgccaggcattcaatacgtgtttgttgaatgaatgaatgaatgcatgaatgagtaaattaatatatttcttgattcggttcatcaaataacatcatcaatgtcaagcaatttgagcttcataagggaagggagtagatgatttgtgctctctgttttctggtcttcactcacctcatttcctagggaaacagcagcctgggtaaatagagaacagagaaatggatgttttctcatatgtgctttggagcccagctgggtttaaagcattctgtctgaatcagctgtcagttcctgaaccactctcctgccttctgtgtctcctcagatgtgcatgacatcacgttcgacccggacacagcacacaagtatctccggctgcaggaggagaaccgcaaggtcaccaacaccacgccctgggagcatccctacccggacctccccagcaggttcctgcactggcggcaggtgctgtcccagcagagtctgtacctgcacaggtactattttgaggtggagatcttcggggcaggcacctatgttggcctgacctgcaaaggcatcgaccagaaaggggaggagcgcagcagttgcatttccggaaacaacttctcctggagcctccaatggaacgggaaggagttcacggcctggtacagtgacatggagaccccactcaaagctggccctttctggaggctcggggtctatattgacttcccaggagggatcctttccttctatggcgtagagtatgattccatgactctggttcacaagtttgcctgcaagttttcagaaccagtctatgctgccttctggctttccaagaaggaaaacgccatccggattgtagatctgggagaggaacccgagaagccagcaccgtccttggtggggactgctccctagactccaggagccatatcccagacctttgccagctacagtgatgggatttgcattttagggtgatttgggggcaaaaataactgctgatggtagctggcttttgaaatcctatggggtctctgaatgaaaacattctccagctgctctcttttgctccatatggtgctgttctctatgtgtttgcagtaattctttttttttttttttttgagacggagtctcgcactgttgcccaggctggagtgcagtggcgtgatcttggctcactgcaagctccgcctcccgagttcaagcaattctcctgcctcagcctcccgagtagctgggattacaggtgcctgccaccacacccagctaacgttttgtatttttagtagagatggggtttcaccatgttggccaggcagatctcaaacttctgacctcgtgatgcactcacctcggcctcccaaagtgctgggattacaggcgtgagccactgcgccctgcctgtttgtagtaatttttaggcaccaaatctccctcatcttctagtgccattctcctctctgttcaggtaaatgtcacactgtgcccagaatggatgaccaggaaccttcaagagtggctgaaaagattgcagagttatcataataaattgctaacttgcgtatttcctatgtgccagataccgttcttgtgcttcctgcacattaactcagtcctcacagaacacccattgggtagatgcttatatcatccttattttgcagatggagaaactgcggtccggggcagttagctaatttgttcaaggtcactctggtcacatggtgagtgaggggcagagctgggattcaagtgtgggtagaatgacactggacttttaaccaccacatcatattgccttcctttattttattttattttattttattttttttgagacggagtctcgctctgttgcgcaggctggagtgcagtggcacaatctcggctcactgcaagctccgcctcccaggttcacgccattctcctgcctcagcctcccgagtagctgggactacaggcacccgccaccaagcccggctaattttttgtatttttagtagagacggggtttcaccgtgttagccagaatgatctcgatctcctgacctcgtgatccacccgcctcggcctcccaaagtgctgggattacaggcgtgagccaccgcacccggccaccttccttattagatcatggacattgtataaaagggaataaaatgcatagcagagaaacttcttgaagtttgcaaatccacacacaacatctgactcagccatcctgccttgcactggctcactgcctcactgcctcacacagcagtcctttctatttggggacagcaaggattagaagaaatgtcttaacagtgtctgagttttagtccctgtgacctctggaaaggggccctactcctctcctctaaagtaacctggaatatgtggacttgtctgatttctcattcaaagaatggttcttttaagaactgtcacgtaatacccacgccccaggtgttcttgttttcatatgaaattttccaccttcctttatggttctcagtcctttccccctgattatttcattcttcttttgacagataagcttcctaagattaatcacaagcattcatcaagcctttaggcaaatggcaaactgtctttaaatgggtttctgaagctataacctgaagtctctggtgggattcaccagaaatataaattttgagtctgttcctgtgacctttgtcaaggcaaatctttttttctccaatcagtctgattggcctgtctcaagagtatattactttagcataacttgacttgttacctatatttgtatctaaggatgtttacagtataggatttaaaatgattttactttaatttcatcacatcattgctttatgctgagatacttgagattcatgattccttatccagtatattcgctctccttcctagcttagtgtcacctgcacaattagtaacccttcctttttttgagacggagtctcgctttgtcccccaggctggagtgcaatggcacgatctcggctcactgcaagctccgcctcctgggttcacaccattctcctgcctcagcttcccgagtagctgggactacaggtgcccaccaccacgcccggctaattttttgtatttttagtagaggcggggtttcaccatgttagccaggatggtctcgatctcctgaccttgtgatctgcctgtctcggcctcccaaagtgctgggattacaggcgtgagccaccccgcccggccataaccctttcttcttaagtcttatccttgttgataaatatatcgaggagattaggaccaaatctagaatcttgtggcactcagtcagtagcttctaggtttaattatatacaaattatgcacgggtggaactgtgcaataatgtagccccacctttttcacctttatccactgaacatgatgaaagacattttcagtggcagaaatcaagatatactatgtttaggctgggtgtggggactcatgcctgtaatcccagcactttgggatgctgaggcaggaggatcacctgaagtcagaagtttgacaccagcctggccaacatggtgaaaccctgactctactaaaaatacaaaaattagccggccatggtgacacgtgcctgcgatcccagctactcagaaggctgaggctggagaattgcttgaacccaggaggtggaggttgaagtgagctgagatcatgccactgcactccagccggggcaacagagccagaaaaaaaaaaaaaaaaaaaagatatgctatgtctgaacttctttgatctatctgtctaataatgagctcaagacaaattgggatcagcttggactgccttattttattgaatccctgcgggttgttggtgcttggtcatggtcattttcttttctaaatgttcacaaaatatttgataaaccactttagatttctgctgtgggttaataccatgtttaccagtctgttgtttccagaatctatcttatttttatttttaaaaaaatcgagatgcctgtctgcatttgatacaatttggatatttgtcccctccaaatcttatgcagaaatttgatctcccatgttggaggtggagctgggtgggaggtgtttggataatgggttggatccctcatgaatggccatgaagacaccatgcttcttgtatagcctgcataaccatgagacaaatcaatttcttttcttcataaattacccagcttcaggtattcctttatagcaacacaatgggactaagacaccgtcctctctcattctccctagtttctcaaagattcccacctgatttgcagtcatgtcattaagttgtgtcagattcctgaaatgtaatttacttagaccagaatacttgagcttatataaaaggaaccatttaggtgtctctttacttgtcttgaacttcattttcctgttaactttttgtctattagctttcaagttcaagacctttcttcttgatatggaagagcaaagcagaattaagagttgggcatatttgggccgggtgcggtggctcatgcctgtaatcccagcactttgggaggccatgcctgtaatcccagcactttgggaggccaaggcaggtggatcatcaggtcaggagttcgagagcagcctgactaacatggtgaaactctgtctctactgaaaatacaaaaaaattagctgggcatggtggtgcgtgcctgtaatcccagctactcaggaggctgaggcaggagaattgcatgaacccggaggcagaggttgcagtgagccgatattgcaccactgcactccagcctgggtgacagagcaagactccgtctcaaaaaaaaaaaaaagagttggacttatttgccttctgtcactgcctcaagcagtgggcgcatcttttttctttttcttggtctaaaaactgaaaaatgactaaaacaaatagaaaaaaaatagaacaagggtttattttatattctctggcattttccttagctgtgtgtatgccactcttttgtattcacccatccttatcttttcttccattatgtagacttacaaaaaaaaaaaaaaacactgaacaaaaatctgaattcaccaagagctcactttggtgccacatgattctgctccattaccagaccatttgtaattgcagagtcagaatgtaattttaaccaccacgtccataatttattcttgtctcaactttttgaaatctgagtgtatatagcattcctttctgagtatcttatgaattataagtaaattcccactttctcccaagaggcatgatgaaatgatgacaatgggattggcccaatcacggagctcttatcccctcagtctggctcagcatgtttttggaatgatgtccctaaattaagtagactaaatatacgtggcatttataatgcgcaagctgctgtgctagacgctaagaaagagtaacccaggaactaactagctgtgtcatttgatcacaagaaggggatttaaactgaagtaaaactgttcatatgtgaagagctaaataggaatctgctcttcaagacaataatagacaaggtgatgtatgaaacaggtttctcactctgtgtcctagggtgctgctgcgttttcgcaggccatctttagggactggcttctgtcttgtgtccttgagtgacctagtccctggtttccccccatctgtgcagccactgcctccattccaggggccaccactccagccccagatgaaagatggaagaaaaggtagtgcatgtctttcctgcttctcctggcttcctcagatttcagcactgactccctccctctgcacctgtgattagacatcttggcagctggggaggaggcccttgcagggcaacctgctgttgatatgcccccaatatgtccatgcagggcacagactgtgcatggctcgggtagagtgttggccatccctgccttgctggaatgtgcctagtttttaatctctatttctggcttgctctgtagtcttgttgggaaaatcccactgtctcccagaaggaagtagtccaagtactggaaaaggagggagaacagatcatttcataaggaccaagggtcaatatagcagtggtcagtcattttaggtgaaaaacctttcccccacattaataacttaagtagtgaccctgatgatcacctgaaagaaagtgtgtatatatgtgcatgcgctggtttctcatgaacaaaagctttttaaatttttttttctttttttttgagacggagtctcactctgtcgcctaggctggagtgcagtggtgctatcttggctcactgcaagctccacctcccgggttctcaccattctcctgcctcagcctcccgagtagctgggactacaggcacccaccaccacgcccagctaatgttttgtattttttagtagagacggggtttcaccgtgttagccaggatggtctcgatctcctgacctcatgagccgcccacttcggcctcccaaagtactgggattacaagcgtgaaccaccgcgcccagccaagctttttaaaattcaacttccaacaagtgtaataccacatgatgggaaggcgagagatgagatatcacactttttccacactccctaatgatactaataataattgttagctcctcacatggtgtaaaagtctactcatttgaccccgacagccacctatgagctaggtaggaccatggtctctacttcatggaagaggagcaggctgagactagcaagtgaattattcaggcatatgaagctgctccgtggcagagcccagttcattccttgccctcctactctgaaacctgtgtgctttcctgagtccctgctggctggccaggccaggtggcagcaggggaaggcaaaggggctgggctggagccagcagaggctcaggtcctctggtgcagtgtcaagtgtgacatcagagccggatgggtgtgacacattgtcctctatctggcccagcagcggccgcaccttccaagcttctccatactatgtgggaaggcaggaaaagcaagtgcagatttagggttgtgtgctgaggaggttttatcgggatcgtgaataaaacagggcagaaaggaaagataggggactggcatgaagcctccaggctgctcgtagcctaaatacttgagaggtcgcagatgtccttcgcatcctatagccttcctcggagaagtgctctcccccactggactcctgtgagtcggtctgatgaggcctatttgcccacctgcctgtttgagtaccactggcgccatgtccccgcattggcctatcccatctggcccatctatcctgccctgtgccaaggccgcattttttttttttttttttttgagacagagtcttgctctctcgcccaggctggagtgcagtggcacatctccgctcactgcaagctccgcctcctgggttcacgcaattctcctgcctcagcctcccgagtagctggaactacaggcgcctgccaccacacccggctaattttttgtatttttttttttagtagagatggggtttcaccgtgttagccaggatggtctcgatctcctgacctcgtgatccgcctgcctcagcctcccaaagtgctgggattacaggcatgagccactgcgcctggcctaaggccacatttttaactgtaacatcagatcccaaatggcttcaacttccccccaaagtcaggtgtatggcccaacctctgaaaggtgcaggccagcaggaggcagggaggaagggagtgaggcgctgtcctctcgcactcacttgctctagagcaccccttgtccctctattctcaggaggcagcccgttgtcatcttctcaaagaagctgtttagaaaaggaggtgccgaggggcaacaacatactatggtccacaggtgtttgaggagaaccgtgtgtgtgcagtgttgagggagaggggataagactcatgtctgaaatctagtctctctgactcccaagtttgtggccctgaaatgtgaaataaagactgagttgggtgattaaaactgcttccttggcctggggtggtggctcacgctgtaatcccagcactttgggaggctgaggcgggcggatcacttgaggtcaggagtttaagaccagcctggccaacgtggcaaaacctcgtctctactaaaaatataaaactcagctgggcatggtggcccatgcctgtaatcccagctactcgggaggctgaggcaggagaatcactttaacccgggaagcagaggttgcagtgagccgagatgccaccactgccctccagcctgggggatagagcgagactctgcctccaaaaaaaaaaaatgcttccttgaagaatgtcagcctcatagattaaaatcctaatttatttaaatctttaaaaacaagctatttataatctgtcaattataaataaacaagttaattacgaaaaaaaaaaaagagctacttttagcttgcagcacttcttagggtaacgtgctcgccttacagatccaaagagtctgcttcgggcctcccttctctttgccaccctcctttgtctggccttcccgattaattaaatattaatctactcatgccttttctccagattcctcttcagacagaagaggttgagctgtgagaactgatctcattcttaacctgattcttattccccattctgaccctagtatgtgactgccattgccaacaaaaccccagcgatggactccattacctttctctggttgtgcctggtctttcaacatgggcattagaaaggcacacaatattgcaaaccttttgattttatctagggtaataatacttagtaacagtaacaatagcagcaacaactgatctcatatatttaatgcaatcctagaaggtagttatcatttttattacccacctttatcttctccatcctcataactaggatggagacactgaggctcagagaggacaggttgcctgctcgagaccatatagctcctaagtaccagagtcaatgtttgaaccgagtcttacctgcagtaggagaattatctcagcatgactttgaaactctttctgtgagctgcccaatatgttttgcctgggccctttgactacagtgagatttctggttagtattgtgaagcagttaaataacttaaatttacattaaacatttctggttttactttgatgatgacttaagaaaatgaatataaacatatttagcatcattgggatagccagtttgtaactgaacagatataaacataagaagtttgcatcttattttatattcatgaatattcagaagccatatataacaacaataattaaagtgcaataccagtaatagtccacatattacttaaatttgactaacagtattcttgttgttctagaaatgagatgaccagctctttcagaatatacagcaactgcctccacataaagcagtgccaggtttaggagatttacggtaaagccatgtttccaaggaggtctgtacaaaaagccagacttctgctggcagttactgagagagataggctttccatccatggcagccatttacttttgctctgggagacgtttgtaatagaaaaggcacaactggggtatttattcattccccccgttcctctagtgtttggtggcgttgccgttgcaagtgcgcagggctaaaatggactggttatcttaggatcatggaaaacctggaatcaaggctcaagaatgccccctattttcgttgtgagaagggaaccgattccatccctctatgccggaagtgtgagacgtgtgtcttagcctggaagatcttctctaccaaagagtggttctgcaggatcaatgacatatcacagaggaggtttctagttggcattctgaagcagttaaatagcttatatttgttacactatttccaaaatatccttcagaccacacagggaaaggatttcatctataacaggtcccggatcaacctcagcaagaaagaggggaaagttgtgaagtcctccttgaaccaaatgttggataaaacagtagaacagaagatgaaagagatcttgtactggtttgcgaacagcacccagtggaccaaggcgaattatactctcttactgctgcagatgtgcaaccccaaattactgctcactgctgccaatgtgatcagagtcctgtttctgagagaggagaacaatatctcaggtaaacaaggccacaggcagagactagagggcccccgaagaccagaaggcaaggcttcagaaatctgtaaggaactgcagttgtagacaacataggtagacagagattgcacagaactcagcataggttttttgaactgacaccttgtcctgacacccgatcctgtttaccaaaggagaaatgactgagtgtaacttccttcttgaaaatgatcaatgcaggaggaagtacacaacttttaactcacaagcatttatcatggatttctgcatctcataggcccagaaatggctggtccctgcccctgaccccttaatgctggtgtcgttcctgctttagggattggactgagctcgagagggttgtaaaggggaagcttttgtttttctcttcagctgccctgcacagaaaccagaccaagaagtcaaaacttagggctttttttttttttttcattcactctaccatgctccttgcttatccatgaaatgaaaccttaaagtagagtttctccaaggctggagatagcttaagggccaaataagtctagggtggtagttctccagctgtggcttgtatcaggatctccagcaggacctgttaaaacaagctcctcccccagaacttcggactcagcaggtctgaggtgggcccaggattctgtatgtcttttcttttttttttgagatggagtctcgctctgtcacccaggctggagtgcagtggtgcgatcttggctcactgaaacctccacctgctgggttcaagcaattctcctgcctcagcctcccaagtagctgggactacaggtgcgtgccaccatgtcctaatttttttgtattttttagtagagatggggtttcaccatgctggccaggctggtctcggactcctgacctcgtgatccgcctgcctcggcctcccaaagtgctgggattacaggcgtgagccactgcactcgaccagggattctgtatttctaacaagtttccagctagtgctgatgttgctggtctggggatctgtctttgagaatcacaggcctagggtgttggagaatcttggaagtgtttggccagatagttcagggaagcagaagaaacaataagggtggtgtctgttttgctttgctataaaggaatacctgaggctaagtaatttataaggaaatttctaaggaaaagagttttatttggctcacagttctgaagactgtaccagaagcatggcaccagcatctctttctggtgagggcttcaggaagcttccacttatggtggaatgcaagggaaatcaatgtatcatgaggcaagagaagtagcaagagaaggggaggggtgtcagtttcttttaaacagccagctcttgctcgaactatattaatagagcgagaactcactcattactgtgggaagggcaccaagctattcatgaggaatctgcccccatgacccaaaaacctcccatcaagccttacttccagcactgggggtcacatttcaacatgagatttggaggggacaaatatccaaactgtatcaggaggcaagagaattgagctttggaggggtccaggagtggaaggtccaacatggggaagctcagatttaagcagaggtgggagaaagctgggagggggtggtcacatggaggcgttttggagttttagctcttgaaggtgtgtaattcctgtcaccagtgcgacctgacaggtggtcatatttgtagactagtggaatccaaaagaattttaaagctggatggcctaggacacaattagatcacaatatatgtcacttgatttatttggtgtgtcaggggtatagaagaatgataatatagaatgaagacacagtgaatcctagggtgtcaaaaacagtaagttagactggagatcaaccgacttaatatccttaatatttacataaggagaccaaagtccagggcatctgactttgcttaggtcacccaccacgtgggctgaaaaccaggatcccctcctgggccccttccactctggagtgagtgctgccagcagcggaaggcctggcttgtacacacagatgcaatgctccacagtgctcttccaaaacttcatcccattcaccataggaatgggctatttacactggagttgtgttaagtcctattacaggttgtggcaaccttcttttttttttttttttttttgagacagagtctcactctgttgcccaggctggagtgcagtggcctgatcttggctcactgctgcaagctccgcctcccgggttcacgccattctcctgcctcagcctcccgagtagctgggactacaggtgcccgccaccacgcccggctaattttttttgtatttctaatagagacggggtttcaccgtgttagcccggatggtctccatctcctgaccttgtgatccgcctgcctcagcctcccagagtgctgggattacaggcatgaaccatcacgccgggccaacaaccttctcttttcttagagcagattctctcttaaaaaattaaatgttctggttgggcgcagtggctcacgcttgtaatcccagcacatttggaggccgaggcgggtggatcacctggagtcaggagttcgagacgagcctggccaacatggcgaaaccccatctctactaaaaatacaaaaaatagccaggtgtcatgcacttgtaatcccagctacttgggaggctgaggcaggagaatcacttgaacccaggaggcggaggttgcagtgagccaagaccgagccattgcactccaccctgggcaataagagcaaaactcagtctcaaaaaccaaaaacaaacaaaccaaaaaaaagttaaatgttctattttgactcgagggtggttatttctatcattgaagaaaattcagcttgagcttccgaagagcattccctgttgcaattcctgacctcgactctctctctctctgcttgtataaacaactcgagaaattttacaatgggggcgtgctgaaaagctaacaggaagctttctgagatttttgcatagaagtttggaggccccaaataaaaacagacataactgctctggtccattctgtacatctttaaaagaaggaagaaaaaatgaaaaagtttctctccacctcattttcctcaacacacccgcttcaagagcaaccttgtcttggtcttctgtgtttcagggctcaatcaagacatcacagatgtgtgtttttcccctgagaaagaccacagctccaagtctgcgacctcacaagtctattggacagccaaaactcagcacacatcccttcctttgtccaaagccccagaaaatgaacacttgcttggggcagcatctaaccctggtaagtgaactttcagcaagaaagccaatatgggctaggtgcggtggctcatgcctgtaatcccagcactttgggaggccgaggcaagcagatcatgaggtcaggagatcgagaccatcctggctaacacggtgaaaccccgtctctactaaaaatacaaaaaaattagccaggcgcagtggcaggcacctgtagtcccagctactgaggcagcagaagggcgtgaagccgggaggcagagcttgcagtgagccgagatcatgccactgcactccagcctgggcaacagagcgagactgtctcaaaaaaaaaaaaaaaaaaaaaaaagaaagccaatatgcaaccaatgtgagattgggaagacccagtggaactggaggggctggcagggtgatagcatctggggatggcagatttgaggaactcacattcatttagcatctacaatgtgctgggctctttgacattactttcccatctaattctcacagctggtaaggggaggagcaaggattaaattgatcaatatggcccccaaacccatatttgcacctctccgctgcagtgcccacaagacacatctgaagatagagatcagaaaggaaactatcaatgatttcctttggagtctttctctgctctgggccacaatccattgtctagtccctgggctctggcatggtggccagctctagaattaaacccaccaatggctatttttgcagtattggattcagtcttgaggagggaacaaaattaatggggaatttggttccccacctcaaggcactccaaagttgggaactgaagcaagacatatacatgaaatatcatcggaaacacaatatcataggaaatacaaggcatagattctaaaacacttttatatggaaaatttcaaatttcaaaagtatgtagaacagtatgataaccacccacatagcactggcttcaacaattatcaacactttaccaattttattccattcatttccccccctttcttaagttgtttaaaattttttcttgttggagtatttttaagaaaattccaggcacaatatcatttcagactctgatactctagacttctccttgggctgaaaaagctgaaaagtacatgtatatatgggtcaaaagattctattctcggccgagtgcggtggctcacgcctgtaatcccagcactctgggaggccgaggcgggcggatcacacggtcaggagatcgagaccatcctggctaacacggtgaaaccccgcctctactaaaaaaaaaaaaaatacaaaaaattagccgggcgtggtggcgggctcctgtagtcccagctactcaggaggctgaggcaggagaatggcgtgaacccgggaggcggagcttgcagtgagccgagatcgcgccactacactccaacctgggcgacagagcgagactccgtctcaaaaaaaaaaagattctattctcaagtggcagaagagatgacaaaaatctagtggcctaaggttagagtctgaggaggtttattttctgggagagcttttggtggggacttgttcttggcctggagtttctacagagccaactcaaccacgtacctttctctggcttcactctagaggaaccatggaggaattcactccggtgtatatccgaaatgaataggctgttttctggaaaaggagacataaccaagccagggtacgatccctgcaatctattggttgacctggatgacatcagagacctgtcttctgggttcagcaaataccgagacttcatccgttacctgcccatccacctctccaagtacattctaagtatgctggggtgtatgaggggatttcccagacacctcccctcttggcccagttctggggtttctgggtccatctttttttttccaggaatgctggatagacacaccctgaacaagtgcgcctctgtgagccagcactgggccgccatggctcaacaggtcaagatggacttgtcagcgcacggcttcattcagaaccagattaccttcttgcaggtacttcctgcaagtctgaaaggggaatgtctgagaccagcttcattttcgtgttgaggctgatatgactgtggacctttcagtaaacccttagctggcctcctcctctacatttgtggccttttaggcttcctgggtcccttctttttggtccaaactcctgttaataactgagtactctttcattgtcagtgcatctcacaaggacaatagggatagagaccgctcaggagcagagagacagagcctttccaacacctcacaaagcagagaacccccagcccccagggagttatattgcagcttatgcagcaagaaagccataaatgtgtctctgcatcaacctcatatggagcacagatgtttataaggctgcaaagtttttttttaagttaaaatgaaattttccccaatggcaatcttctccagcatttttacttctcagtttcttgccagaagtctcaccctaaaccatggattttggtaacttggattttttttcccccagcagagaggacagaggatgagaagcagcagctatggtgaggctggcgacagtctgaccgtctttactggtccccctgtggcatttggtgtttatttttctcctccattcgatctgcacacactgccagaggaactggccagaagtgggcctgcctgctgcagccagggcttacccatccttcacattttgccaagaactagtttttcccttcctcctgcagagttggagccaagagaagccattttctgtttttatttttattttttattttttgtctttttccaggggtcctacacaagaggaattgatcctaattatgccaataaggtttctatcccagttcctaaaatggtagatgacgggaagagcatgcgtgtgaaacatccgaagtggaagctgagaacgaaggtgggttccaacagcatctggggcaagtagctgtgagcgtctcattctaattgtcattgaaggctgaggtccagactcagccctggagtgaggacagaggatcacggcaggtgacactccttaaggaagacgagagttctgtgttgctactgacttacaagacacttcctcttttttttttttttttaatgagatggagtctcgctatgtcacccaggctggagtgcagtggcacaatcttggctcactgcaagctccgcctcccgggttcacgccattctcctgcctcagcctcctgagtagctgggactacaggagcccgccaccacgcccggctaattttttgtattttttttttagtggaggcggggtttcaccgtgttagcccagatggtcttgatctcctgaccttgtgatcctcccgcctcggcctcccaaagtgctgggattacaggcgtgagccaccgcgctcagcccgacacttcctcttcttaagccttgctttactcatgtgttggatgggtggattgatttggttgtcctctcagggttcttccttacttcaaagcccctggccgtgttttgtgtccatggcaccaggtcatttagtggcaagttcagaggccaggagcaaccccatcagcccatgcctctggaggctccagcatctgctgctcaggaatttgaggaggacccgaggggagggccagggctggttccagaatgcctagggcctagacgaattcggctccctcatccctcacttccaggtttactctggctctaggatggaaggggagagttaactaaatatagccctttccactagttcttgggcaataatgaagagtgaccggaagactcttcgagctctttgctttgactatcaaggcatggttgatattcctaaaaccattagatttctgccccccactctgcttaaagtctattttaaagtctatttaattggccccaaaaggatagttgatgagggatggtttgactgtcgcttcccataaggcagctatgttaaattagaatttgagaaacagaagcatccagagagagcatctagctcatatgacctgtaggggccaggcaggtgacacaaaggaggagacgggtcgtgtgggcagtagcggacggtgtggctgtcatggactggacagttcacctgcatctgaagggccagctgctcatcagttctggctaattattgtcttgagagattgtcttgaggcccctgacctgctagaccatctaagtcttggaagatagaaacctgaggtattatgtgaaatctcttgcttttattaaatgctggcaaccatttaaaagcagttttaaaaactacataggccaaagaaaacacatttctgggccaggtgcagcagctcacgcctgtaatcccagcactttgggaggccgaggcgggcggatcactaggtcaggagtttgaaaccagcctggccaacatagtgaaaccctgtctctactaaaaatacaaaaaattagccaggcatggtggcagtgcctctagtcccatctactcgggaggctgaggcaggagaatggtgtgaacccgggaggcagagcttgcagtgagccgagattgcgccactgcactccagcctgggtgacagagtgagattccatctcaaaaaaaaaaaaaaagaaaacacatttctggatttcctttgacctgcagtttttcatttctgagctggtcccttcacccattttatagataaagaaactgaggctcagagaggtcaagctctcccagccagctgagtgaaagaggcattcatttgaacgtggacctgtttttgttttcaagtctgttgctcttttaagtataacacaaagaatacccttcttccttgggtgatacagtcagtaatggcccaacagaaggactacccagccagtgtttgacattctaggaatgttttgacagaactggactgtattgacagaattgtactgtcatcttggacaaacaccgccactttaagttccaggtccctttctagtctcatgcatttcaaggaaatctcttctaactacaagcagccagaaagaacagacagtaaaacacagataagacatctagggcacagagggaagtggggggacagtctcttgggtaactaccaaacttcaccctcatacagtgggcctgagtaaaacagtgggccatcatgagcacattcctttccattcaagtgcactaagatagtgaagctaaagcagactcgggggtatgcctgcagctgcagaaagatgtatagggacagacacacaactctccctcccagataagcacaacaaagagacacagaagcagtccaagcatctgataaactctcccaccctgaatccttaaagactcttagtctgtaagagagtgcggcttctaatgtaactcggtcagaattccctcccagatttgaaataaacctgttgactgtcaagccacccttcgcctttctctcctctttctttaattcttacatgtgtaatttaagaaaaggggccaggcgcagtggctcatgcctgtaatcccagcactttgggaggctgaggcaggtggatcacctgaggtcaggagttcaagaccatcctggccaacatgacaaaaccttgtctctactaaaaatatagaaaattagccaggcatggtggtgcatgcctataatcccagctacccgggaggctgaggcagaagaatcacttgaacctaggagatggaggttgtagtgagccgagatcacgccactgcaccactccagcctgggcaagagagcgagactccatctcaaaaaaaaaaaagaaagagagagaaaagggagagaagcagagaagcaggtgaaacagtatggagaacacatgaaatagcaagactaagcagttacagagtctcctaggaaaagcggaggtgagtgcttctcagggtggtgagtaatagcatgagtgtaaactgtgtgcctgatgcccgcagctctgcatacagcatttacttgatttcaccatagatcgaggaggtgttgttgctcccagtttatggatgtggaaatgaaggatatggtgtgagaaagtggccgaggtctcacagctgggcagtggcagagctggaatttaaactcaggtctttcccttcccaatgactccaccatgtggcttcttgggctcacaaaacttaggagatgagcaagggccaatgaattctcacctgggttgggagaatccagggcagcattatttaattcaggctgggatatggaaaactccctggacactggaggggaggcaggttggcagattcttctgagcagagatagactacatggttaaagattaagaaggagagggagcagaggaaagagggcatctgaggaagagtctaaaggcatggagcagaaggctaaggtttggaaggagacttcagagatgtccccaagaggactctcaggtgcaaacatgatgctgtgttcttctttgccttcaagataaatatattctgctttttcttcctgctagtctaatgggactgttatttctggctatttgaggatagaatatggcagggaatataaatggaactgagagtctagttcagtcatctatgccagaatttagcatgtctggaatgccagaaggtgtgtgatagaggaagcaaaggagggagggaaggagggaggaggaatgaaggcaggcaggcaggaaggaaataaagaaagattgggaagcaaatgaaagcgcccttgtcacgacttgataaaattgatttcctttccctgagtcccagataccttatctgtaaaataatgagaacattttgtggggcaagggatctactttgtaaggcagctacaaggacaaatgaaagttgcagatgtatgaaaactttgaaatgcaaatgcaggctgggcgtggtggctcacacgtgtaatcccagcactttgggaggctgaggcaggcagatcacctgaggtcaggagttcgagaccagcctggccaacgtggtgaaactccgtcgctgctaaaaatacaaaaattagccaggcgtggtggcacatgcctgtaatccccactacttaggaggctgaggcaggagaattgcctgaactcgggaggcggaggttgcagtgagccaagatcatgacattgcactccagcctgggtgagaagagtgaaactccgtcttaaaaaaattgcggccgggcctggtggctcacgcctgtaatcccagcactttgggaagccgaggcaggcagatcacaaggtcaagagatcgagaccatcctggctaacatggtgaaaccctgtctctactaaaaatacaaaaattagctgggcatggtggtgcacgcttgtagtcccagttactctggaggctgaggcaggagaatcacttgaacccaggagggcggaggttgcagtgagctgagatcgcaccactacactccagcctggcgacagagcgagactccgtctgaaaaaaaaaaatgcaaatgcatagcatagcatgtgtagcagtaatttcacagttggcttaaaatcccctgagtgtgctttgtactatcacgtagatgtaatatacatatgacgttccgacttctgtgaaatggtcggtcaaagggcacctgtgactttatgttgtgaggataccctttgtgagctgatttttgaaaaagttgtgttattggtgacatttggaattcagccttgaaagttcatggaatcagggcacatggaaaatcaaagagatgaaagaagaattaagaaccttgacccaacattttctaactcatggtttcctttggtgcttgctcactggctgctcccttctctgcagagcagcagcctcagccttcagaggaagaatccgtgagccctgtgcccttaccagggagaccctaggggctctgggactgtgggtatttgaagttaccactgagctttaacttcaaatattcccttgttagaatgagtacaacctgtggactgcataccagaacgaggaaacgcagcaggtcctgatagaggagagaaatgttttctgtgggacctacaatgttcgcattctctctgacacgtaggtactggggtcagaatctgggtctctagggatgcttgagttacccacactgacatttgggatttccctgacctttgtgtacatggaaaggcaagctctcctcacctcaagctccagccctaaacttgcacatgatcccatgtagacaatacctgcttcattttgcaccattcttggcagtgggtaaaggacactttccctttctaaattttgggtatgctgaccaacaaccttttgcacaagtcacacataaaatctttattttttgaaatatctttattttgttttattaattttagaaataatatacggttattggaaaaaatctttcaaatgccagaaaatgtatagagaaaggcaaagttttcctgtagtctatcacctagcaataaccaccattaatattgatgtctacccttctagaattcttttctttgcatacttagcacatattttagtagaagtggtgttatattacacatatttctgtaacccagcccagcaaagtactatagatatcttcccatggtaaatatgacaatcgtatttataattgcatactctgacatcatttcaatatgctgagagacgaagttcctttaataagcaactttctgccatattttgggcctaggacttcactttatattcacaaggttttgcaaagtccacttctactttatttttggccatgaatcttattaacaaattgcatcttgataatagaacagtcggtatggggaagacagaacagataagacaggggaaaggcaaagttgagtttttatgcttagtgtggtgataactgctctttagaagagatggtgactagttgaattctaggtatgaccaacggaataagggcaaaaatgtcaagaattgctccttatatatatgtgtgtacatatacacacacacatatatatatacacatatacacatatgtacatgtatatatatacataaaaatatatgtatatacacacacacatatatatgtagtttaaagaacaattatcaccatactatctgtatttcttttttcagagtgaacctcattctgtcgtccaggctgggctgcagtggtgcaatcttggctcattgtaacctccacctcctgggctcaagcgattctcctgcctcagtctcctaagtagctgggactataggcacatgccaccatgcctggctaatttctgaatttttttgtagagacggggtttcgttctctggtcaggttggtctcaaagctcctcatatttagagtgactatacatccctgtttattggaacaatccctctctagtctgcagtcctagtgtcattaataatagtgtccccaggttgggcgtggtggctcatgcctgtaaccccagaactttgggaggctgaggtaggaggatcgcttgaggccaagagttggaggttacagggagttattattgcgcccctgtactccagcctgggtgacagagcaagaccttgtctctaaaaataaataaatagtgtcccctttcacaataaaaaactctcagtttggacaatacattatttggtcatcctgttcatactttacctatttgctaataatcctatgattgaaagactaattcaactcacctagttttatgggacaataagctcattgtaagtaaggtccttatctgataattatttatatttcctgtggtatctactagcacaggactttgaacctaatatatgctcactggatattgattaagggaaaaaacaaaagaaaagaaatacagtgtgcacaggacttcccaactgtgttcctctgacgttttccaagaaaaaaggtttccgtgatcaattaaatccgggcaatgccacatactccattctctctcttggggatttagcatacatttacagaattgttaaaaaattgccttgtgtctctagtttttaaatttaacggaaatggatttttgtcatcgtgtgagagtggggatccctcaaggcctgttaattctcgaccttgccttctgctgcctcccttgttgaaaggccctggattttcctttacaccactgctgtaggcaaaagtcatggggctaagtcagtcccaggagggacactgactcttctttcatggataatccttttcccctggcactcaggtgggatcaaaaccgagtcatccactattccgggggagatctgatagctgtgtcatctaatcgaaagatccatcttctggacatcatacaagtgaaagcgatacccgttgaattccgaggccatgctgggagtgtccgggccctcttcctgtgtgaggaggaaaactttctcctaagcgggagctatgacctaagtatcaggtgaggagtccaaaggcatcatgatccctgtcccacctagggcctagaggcagctcatggaagaagtgtgcatgcttcttctttttatatttaacagttttcctagaagatactgacttctagaataccttcagcttttttttggcaaggaaaaagtcaggaatgtatatattgcttaaaatttgaatgagatggatttataacagttatcagatatattttctaattgatgactgcaaatcagaaaaattttctttattagcattcttagaggaagaaataatttacatttgttcttacagactctttcaggggaacgtggtttttatgggtttgagacagactatagaggcaaaatagtgctttaaaaacacatacgtggccaggcgcggtggctcacgcctgtaatcccagcactttgggaggctgaggtgggcaggtcacgaggtcaggaaatcaagaccatcctggctaacatggtgaaaccccgtctctactaaacaaaatacaagaaattagctgggcgtggtggcgggtgcctgtagtcccagctactcgggacgctgaggcaggagaatggtgtgaacctgggaggtggagcttgcagtgagccgagatggtgccactacactccagactgggcgacacagcgagactccatctcaaaaaaaaccacatatgtatatttttaaacaatataacaaacactcatgcatccattactcaggccaagaaataagataccaccattccccaaccctcccactgtgcccttctcttcttgcttcttcctgccaaccagaggtaatattattctaattttatactaatgattcccttgcatttcttaatcatttttgcttccttcttatacatctccagaagtattagttacttgtgcctgtttttgaactcaacataaaaagaatcatattttaaaaatttgttggtacctcattcttacatggaactgtttttgagattcacctatatgatgcaggtggcagtaattaacttattttcactgagatactgtattaaattggatgattgtatcgtaactcatttatttgtttttctgttggtggacatttgcattgtttctagttttttgtttttttttttgagatggagtctcactgtgtcacccaggctggagagcagtggcgccatgttggctcactgcaagctccacctcccaggttcacaccattctcttgcctcagcctcccaagtagctgagactacaggggcccgccaccacaccaggctatttttttttgtattttttagtagagaaggggtttccccatgttagccaggatggtctcgatctcctgacctcgtgatccacccgcctcggcctcctaaagtactgggattacaggtgtgagccaccgcgccgggcccttgtttctagtttttaattatttcaaagaatgctgccagagacgggtcttggatgtgtcccctggtgcccatgtgcacgagttttttaaaggtatattcttagtatgggaatttctaggaaggagtactaaactgttttccaatgtggttgtattaatttacattcccattagcagcatatgagaatatctcttcttatatattctcaccaacacttactattgacagtctaacagttttgtcaatctgatgggtattaaatgaaacccactgtgttttattggggtttaaattttaactttcctgattactaatgaagttgaacaccttttcatatgtgtattagtcagggtctccagagaaacagaaccaatacaatgtgtatatacataggagatttactataaagtattgacttgtgtgatcaaggtggctggcaagtccaaaatctgcagcgtggggccagcaggctggagacccaggagagccaacggtgcagatgaagcccaaaggccatctgccagagaataccctcttgccaggactatctattaactgtgttcatagtatctacatgaattttgttgaacaaaaattctcaatatgggccaggcgcggtggctcatgcctgtaagcccagcactttgggaggctgaggcaggcggatcatctgaggtcgggagtttgagaccagcctgactaacatggagaaaccccgtctctactaaaaatacaaaattagctgggcatggtggcacatgcctgtaatctcagctactcaggaaggctgaggcaggagaatcacttgaacctgggaggtgccactgcactccagccagggcaacaagagcgaaactcggtctcaaaaaaaaaaaaaaaatctcaatatgaatgtaataaaatatcagtttatcagggttttttttttcttcatttctgtgattcttccctcttctaggtcatagagatattttctaatattttcttctatcaacattacagttttatcttttgcattcagttttttaatctctttgcaattcaaccttgtatgtggcattaggtagggtttccatttcatttattcatatttagataaagtgagcagtttctcccccacagcaactactatataacctgccacttcctgcattgatttgaggtgctatctttatcacattgaaatttcccatatgtgcatgagaatgtccctgagttctctgatctagtccactgcctttctgtttttaatcaaaatccccctccttgaaaactgtttgttttgtttttaggtatgcatttggagaatgttttaaaatgtgacggggagggaaattctacttttcacttttctttttttttttttttaagacggagtctcgctctctcgcccaggctagagtgcagtggcgcgatctcagctcactgccagctccgccttccgtgatcatgccattctcctgcctcagcctcccgagtagctgggactacaggcacccgccaccacgcctggctaattttttgtatttttagtagagacaaggtttctctgtgctagccaggatggtctcgatctcctgacctcgtgattcgcccgcctcggcctcccaaagtgctgggattacaggcatgagccaccgcgcccggcctcacttttcttttttatgtaacagctatagtatataagttttgagtttttggagtaagtttaccaactttcaataaaacctaactagactttatttgggttgcattgaatttatagattagtttggtaaacacactcaattagatcatctgtgttctttcttagagccttaaagttttcttcataaaagtcctgtgtatttttacttaatgcctgtacagttataattttattactattgtgaatggtatcttaattttgcttatattttcaaattagttattgctggcatagagaaatgcaattgatttttgtaaattgatcttgtgtctggcatccttgccaaactctcttattagttgtaaaagcatgtatgtttcataattggtttttctttttctttttctttttttttttgagacggagtcttgctctgtcgcccaggctagagtgcagtagtgcgatctcagctcactgccagctccgcctcctgggttcatgccattctccttcctcagcctcccgagtagctgggactacaggcgcccaccaccacgcctggctaattttttgtatttttagtagagacggggtttcactgcgttagccaggatggtctcgatctcctgaccttgtgatccacccgcctcggcctcccaaagtgctgggattactggcgtgagctactgcacctggccaataattggtttttctacgtagacaatcctatcaactgcaaatgacaatatattatcttttttttttttttttttgagatggagtctcgctctgttgccaggctggagtgctgtgacgcgatctcggctcactgtaacctccgactccctgattcaaaggattcccctgcctcagcctcccgagtagctgggactacaggcatgtgccaccacgcccggcggctaatgtttttttgtattttagtagagacgaggtttcactatgttggccaggatggtctcaatctcctgacctcatgatctgcccacctcggcctaccaaagtgctggaattacaggcatgagccaccacgcccggccgacaatatattatcttcttttctaatgcctataccaccttttgtttttcttttcttctaactttgcctaggccttccagtgccatggcaggcagtagcagtgagagtgggcatcttcatcttgttccccttctggaagggaatacatctacagtttctccactgagcataatacctgctgttatgactttggcttataccttttactaaatctggaaagttccttcttttcctatttttctaaaagtatttatcaaataccttttcttgcataaatttaaaaaaccaacctgaagacatataccaccatattgctagaaacagaaattcaaaacatgctttctttcagagcactgtgccatcattcaatgcactgtggctgcattgtaggctctgagaaactggtaaggcattggtaaggctgcaaaacccttgggaatattagaagaaaaagctttaacatatccaaaaaactacaaagacatattaatcgtttttatgtgccaagcctcacaataactctgtgaagtaagtacaattttttttttttttttgagacagagtctcactctgtcgcccaggctggagtgcagtggcgccatctcggctcactgcaagctctgcctcccaggttcacgccattctcctgcctcagcctcccgagtagctgggactacaggcacctgccaccacgcccggctaatgttttgtatttttagtagagacagggtttcaccatgttagccaggatggtctcgatctcctgacctcgtgatctgcttgcctcagcctcccaaagtgctgggattacaggtgtgagccaccgtgcccggctgttaagtacaattattattctcagtttacagatgaagaaactgaggtaagtggtagttcagtaatttgcccagaatcacacagctagtaagtgatggccctgggaatggacttcaggcagccttctccagaaccattatctcagcattctgctttgtcctgtctcaaaagcagcctacctgaagcggaagcatcaatggcagttgagagaccttgggcaagtgttcttgttaaaaaacagataattcatctttgctcccatctatctcttagatatgctctatatgtacataaatattttggatctaagtgattggtaaaggattctgttgctcttgtttgcagatccactgtaccgtggaatcagtgccatggattctaaggctggtggtcattcaggacgcttctatctaaaaaccacctgacactgatcaagcattttgtacatgttagtcactattccagtgttatctccactggtgcagggtttctcaaccttggcactattgccatctggggctgggaaattctttactgtggggcctgccctgtgcaatgtaggatgtttagcagcatctctggattctatgcactagatgccagtggcacctccttcccggcttgtgaccaccaaaaatatctccagatatttccaaatggcctatgggggtagaagttacccaagattgacaatcactgtattagtccatttaattcttcacaaaaaccctatgatgtaaatactcttttttttttttttttttttgagacagagtctcgctctattggcaggctggagtgcagtggcacaatctcagctcgctgcaacctctgcctgccggattcaagcaattctcctgcctcagcctcctgagtagctgggactacaggtgcacaccaccacgcccagctaacttttgtatttttagtagagacagggtttcaccatgttggccagtatggtctcaatctcttgatctcatgatctgcccgcctcagcctcccaaagtgctgggattacaggggtgagccactgtgcctgaccaacgactcttattattatttccattttatcaatgaggaaaggaaacgtaacacaaaaattaacttcctcaaagttacaccaaataggtgctgcagctgggattcaaatccaggcccctgactctaagctgaaccatgagaatctgctgcctcccaactaactacttatctacatgggttctacgcagtatgatcctctgggccctcaggaactctcacattcttttggcctgattcctgcagatactgggatctgaaaagtggggtttgcacacgaatcttcggtggtcaccaggggactatcacttgcatggacttgtgtaagaacaggctcgtatctggaggaagagattgccaggtaaaaggtgagaaagaagtgccttaaattttctaagaagtttcccccgacccacgggttaccaaaatgctttgttttgctcatttctataggcaggcagtcatttattctttatcatccatccatccatccacccacccacccatccttccttccttccatctatcaatcaatccatccattcaacagctgtctgtagaatacctacaacaagctacacactgagctaagtgctgaggagaaaaaaaataataggatatggccctttagatttaactttttatttcttcaaagggctcattgtctcctaatggaagcagatacataaatatatagtggggaatataataagtccatgaacaacaatggctgccatttactgagtaccagttttgtgacagatgcttaacatacattatttaatcctcactagagccccattggtaattttataaatgggccaagatatatacataaaatataagtgaaggaaagcatacttacatagttagggctaaccgagcagaaatgattaagcacatggcctctggatccagactccctaggtccaaatcccggctctgccactcaccacctgcaagacttgagcaggcaacccaacttctctatgcctcagtttcctcatctgtgttgtggggaataataatagtacttgtcttgtgacgatgagcatgtcacacaccttgagtcatcgccggctgttagtgccatgcaagtgtcaactctggttgttgttatattttgtctcaggccacttgtcctgttgcctgaggaagaaggtgcttttggggagcacctttgaaggagactttaatgttttcattcctgaattcatagagatcactttcaacttcttccttttttttttgagatggagtcttgctctgtggccaggttagagtgcagtggcacaatcttggctcactgcaacctctgcctcccgggttcaagtgattctcctgcctcagcctcccgagtagctgggactacagtcgcacgccaccacgcccagctaatttttttttttttttagtagagacggggtttcaccatgttggctaggctggtctcgatttcctgacctggtgatccacctgccttggcctcccaaagtgctgggattataagcatgagccactgggcccggcattaacttcttcattttagaaaaccctgttctgccacccacccacccactctcatccccactacaagatgccaggcagttgctctaacacagtctgtgttgaagcagcagtaaacccacccctagctgtgaccatttctccataaaattgaaaagtcagattcagaagtatttaaaaatgtaagtgagggtagatgaccttctttcattttggggatagaaggtgtgggtcaggaagacaacatctgggaaaaatgacaacactacatgtatgccatgattttctttttttttttttaattttacctgcccctactcaagctgtatgccatgatttttatgaaatctactcgatagcaagcatttttcaggcttgaggaattagctgattagagatgagctgtctagcacttgggcctcaaggctaagttccagggccatagccaaggtcttctggattgtgggctccctcaaccacctgtattcagggcgctctgtgctgtgggcacatgagcggttggtgagcctgctctgcggaggtgctaggccacgggaagtccttctagaatctgacttgatgggcttgatgagtctttgcttctgtgatggggagcagaactccactgtaacctttccttttccccctttttccccactcccatgtcttcctctctctccctcctgttcagtatgggatgtagacacagggaagtgcctgaagacgtttagacacaaagaccccatcttggccaccaggatcaatgatacctacattgtgagcagctgtgagcgagggctggtgaaagtgtggcacattgccatggcccagttggtaaaggtaagtgggcagtgggctaccttggcggaaagggcactggggaggagatgggtgggctccccctacctagctcctcaggtcatcctagagcaactgagtatgaccttcaagaaggacagtcctgaagctctaaaggggaaggccccaaagtgaggcattcagagtctgtggagggtaggggctccaccacccacatcatgacccacggtatcatggggttggtagaggaaggctgcattctgactcagcatgagatatgggctcagggccttctaacagcagtggaggtgaagtacctttttctcctccagagtattgcactctgtagggccaggcgcagtggctcacacctgtaatcccagcactttgggaggccgaggcaggcggatcatgaggtcaggagttcgagaccagcctgaccaacatagtgaaaccctgtctctactaaaaaaaagaaaatacaaaaaattagccgggcatggtggtgggcgcttgtaacctcagctacttgggaggctgaagcaggaaaattgcttgaaccagggaggcagacgttgcagtgagccgagatcatgcgtctcaaaaaaaaaaaaaaaaaattctggcatggggtgaggggatgaacaaagcattttttcctaagaagaaaacactgggggatgaacagagaatttttttttctccatgctctctaatgaagagagaacatggatggtcttgaaagtgattggatggtcatgaaacatattcttgctggatctgaacccctagccttagcgggtggtgttgatatatgatttgcagcaggaacacaggatcacagtgaaaagtggctggcttggcctgtggaatttccccaccaatcttgtcactatggccaatccagcggttgcaggcacagggatggcccatgtgcactctgggttctggcaaggagctgggatggcacaccttaccttcgtccttctcacagcaaaggacagtgatttctggccctctctagtgctccaagaaggtagtgtctgtcccaaacacagacccaccaggagcaaggccccaccctgatcccattcctccttaacccgagagagagctctatgtggaatggactccattggccttctttttttcttttattttttcttttccttccttccttcctttcttccttccttccttccttccttccttctttctttctttctttcttctttcttttttgagacagagtctcactctgtcaccaggctggagcacagcagtggtgagatcttggcgcactgcaacctccatctccctggttcaagcgattctcctgcctcagccacccgagtggctgggattacaggtgtgtgccaccatgcccagctaatttttgtatttttagtagagacagggtttcaccatgttggccaggatggtctcaatctcctgaccttgtgatccgcccgcctcggcctcccaaagtgctaggattacaggcatgagccaccgcacccggcctccatcggccttcttagagcaaaagcaggattagctcaggtacctaccgagtgactggcagtcacagattggtggggggtggctttgggattcatctgaagaagcctcagctttggttcttggaggagtcacagtctgagttgaagacagtggtatcttttcttgcagactctcagtggccatgagggagccgtgaaatgcctgttctttgaccagtggcatctcctctcaggaagtactgatggcctggtcatggcctggagcatggtggggaagtacgagcgctgcctgatggccttcaagcatcccaagtaggtgcctgtgaagcccggagcgatgaacctggtgtccttcccttccccgtcatagcctagactgcaatcattggcagaccttctgctccctgtagacatcgtgttctctgcacctcaccctctctgcttccctcctcttccacctgggacccatttttccccaccatcttctctgtctgactgttaacctcttctactctcccttgttttcttgtgaagtaactatagaaactgggggttttgagaagttattgattttttttttttttttttttgagacagagtctcgctctgttgccaggctggagtgcagtggcgcaatcttggctcactgcaagctctacctcctgggttcacgctattctcctgtctcagctttctaagtagctgggactacaggcgcccaccaccacacccagctaattttttgtatttttagtagagatggggtttcacggtgttagccaggatggtcttaatctcctgacctcatgatccacccgcctcagcctcccaaagtgctgggattacaggcgtgagccaccttgcccagccaataatactattttagaaagaatcaaaacattaaataattctcagcatgactattgtataagtaaacgctaggaatcaaattgcaagagacaaacatgatcatctatatgttagataaaaaaaagattgtgacatcagcctttttgttttgtcatcttgtggccctgtgacctaattgcggggaaagtagctgcagaatgggaagaggtatgtcttgagagaagctcacggtttacttccacaattataaaatgacagcaggccgggcatggtggcgcacgcctgtaatcccagcactttgggaggccaaggtaggtggatcacctgaggtcaggatttcatgaccagcctgactaacatggtgaaaccccgtctctactaaatacaaaaaaattagccaggtgtggtggcgcatcactgtaatcccagctacttgggagactgagacaggagaatcgcttgtatctggtaggtgggggttgcagtgagccaagatcgcaccgttgcactccagcctgggcaacaagagtgaaactccatctcaaaaaaaaaaaaaaaaagacagcaaacaccattttgaggccagttatggccagtgctgctcaatcacacacaaaatgctcccaacctacaaacaaacccaggcattttacgagaggatgggtactgcctgctactctgttcccttccagggaggtgctcgacgtgtcccttctcttcctccgggtcatcagcgcctgtgcagatggcaagatccgaatttacaatttcctcaacgggaactgtatgaaggtgttaaaagccaatggcagaggtgatcctgtgctgtccttctttattcagggcaacaggtgggtggtaggtgtggaggtcagaactgtgagtgattctgttggattttttgatttttttcctcccctgggataccagccctggatttgctgtcaggaggagagagtgtgcaatgcctctctacaattctggctgggtggagcaatagtcttgtggtggggactaacagggctttgcacaaaacttagtaatcaggaagcaatcaactgttcattttgactttttttttttttttgagacatagtttcactctgtcgcacaggctggagtgcagtgatgtgatctcggctcactgcaacctccgcctcccgggttcaagcaattctctgcctcagcctcccgagtagctgggattacaggcgcccaccagtatgcccggctaatttttagtatttttagtagagacggggtttcaccatcttggccaggctcaccttgaactcccgacctcgtgatccacccgtcacggccttccaaagcgctgggattacaggtgtgagccaccacgcccggcctgttttgactcttaattcatcctaggtgtttgtgggaattgcagtgggtgcaacataacgcttctgtaaggaccacagttctaccaatgtgcagcccctgcttgctctttgatcatgcctttggctgcctgagagctctatcagctatctttgatgcctcacttctaatgcaaagagacattataggagagtggagggtggcagcagcagggggtacagtgggggaaagctgagctggtgagcttacaaaaccagtaccatgactgactgcattgtatacagtactgtgctttatatatgcgtagactcagggtgctattatatgaaaataaccaaatagaactaacctgtaaattctacttcaagctcacttgagacatctcttaatgtccctaaaccatattgccttccttttagtgaaactttattagtattatttaccatcttaaagagggcagcctggtaataaggctcaattaatgaacacttttcagtcatgctgctaaaaaaaaaaaacaaaacaaaactctggccattttttactcacagcatccaaagaaaggtgtttttctttcggcttgagtgaacgtaagtctaaaagggatttcttattggaatgacaccccgcattccattccagcagttccagccaaaacaagttacttttctagagagtttatgctgttggttaaggtcttaacactgcagccttttgaagcagaaagaaacctgtgcagagtattttcatttcttgtttatagttaagggaagagcacagaaaggggaaagccgcttgcttgtaaaactggtgggttagggaggcagtgctgtgggggcacaggaaggggacagggagggcaagttccggagctctttgtctatggagcattaaagtggggatcagagaagttagaaatcatctcactttataaagtatagatgttctgtctacatctagagtgtgtgcagagatcctggagtgacagcatggagtgtgtggtgtctgcgtggagggtctatgaaggagaagaggcctccccattagagagctttcctcattcccagcagcaatagtaatattgggtttggaagctgtgcttaaaacaaacaaagaaacaaaaacactgaatttcaagacatctgtgtgcagagtaccttcttggcaccctaggtacgtggcactcactccaggaacagaaattcatttaaaagcattttaacttgaggccaggcgcagtggctcgtgcttgtaatttcagcactttgggaggcccaggtgggtggatcattgagtcctggagtttgagcccagcctgggcaacatggcgaaaccctgtcgctactaaaaacacaaaatgagctgggcgtggtggtgcgtacctgtaatcccagctactcaagaggctgaggcacgagaatcgcttgaacccaggaggcggaggttgcagtgagctgagatcatgccactgcactccagcccgggtgacagagcgagactccttctcaaaataaaaaaataaaaataaaaaataaaaaagcattttgacttgagaagtgaaacaatcggaacatatgtgccccgatcatgtttattttttaaagaaaagagtgacaaagctaacgactcctgctgcatctcctggtaactttcaccactctccaccctccagctgcctacactactagtctgtttggtcatcacctgggcactgttcctttagtctaaagaccaggtgggatggtaactgcagtgcatctttcggtggcctccacagtccttttgtggacaaccctgttgtttcggttccaggatggtggtcaacacagagagcaatgttctcatgttccagtttgagcacataaagtggcagtatgccgtggaaaaaacgaaacaaaagaagaataaggagaaagaggaggaaaaagaagaaaatagtctcatggaaattctctctaagtgtaatattcaggttcacagcccaagagagtctgtatccagtaaacaaactgtgatccaagagctcctaccaggcaaacctcccaagtcccgagtactcctgaagccggccaagttctcttcaggtaaaaaactgaaataccagcaagttcagtgataacccacagagcaggtcggggtttggtgggggtggtgggagacggggaggactggttcgtttgtggaatattttggccagtggtttcctgaggatataaatcctaaccctccaggaaggtaggagccattctctctgatccactaaacaatttatcagccagttaaagggaacattctggtttgcaaaagctagattttctttctttctttctttttttttttttttttgagatggagtttcgctcttgttgcccaggctggagtgcaatggcacaatcttggctcaccgcaacctccgcctcccaggttcaagcgattctcctgcctcagcctcctgagtagctgggattacaggcatgcaccaccacgactggctaattttgtattttttttttagtagagatgggctttctccatgttgatcaggctggtctcaaactcccgacctcaggtgatcctcccggcttggcttcccaaagtgctgggattacaggtgtgggccaccgtgcccggcctgcaagagctagattttcaaacttataagaacctttgcacagtagataagactagccttaatacttaccactgaaacaaaaagcaagcaaccaatacccccaccccccaaattcaaaacatatattacataactatttcttcaagacagagacagaagttgttataagcagaaaaatgatctgtgcagaatgtattgtttttagacctgagagataatgtttgtagctggaaaatcttacgtataaagcaggtgtgtgtgtgtttgtgtgtgtgtatgtaggtgggggtgcaggcatggccaatgccatttataagacatccaaataatacattatgtgtgggttagagtagcaagactccttccttttaccagccctatatttggcatgtgaaattggatccacagatctatagagaacaatgataaatcacccccaagcatatcacactacaaatagtcagctatctcttgagaggagggaactgagagtgttagctaatgcttaacagtaggaaaagtgggtgggagggggaatcaggatgggatctaggccttagaattgccaacctaaaataaccaaaagattcaggatctagctaaaagagtttacccgagtgcaaagtttgagggcagcatccagggacacaggggcaccaaagactagtgaccagtgttcctggagtggggaaaagtgaagatcctttaaatagacaaaaacagaggtgctgaacagaattcagttttccatacaaaggctaacatacagatgtaagactagatcggctactattgattacactctaatggttgcttagcattctgctgtaaagaggtgacaattacaaggggagttgcttaacattctgctgtaaagaggtgacaatcacaaggggagttgcttaacattctgctgtaaagaggtgacaatcacaagggtgtctatctccacatcatttagtcttggtttcaatgaagaatagagagtctggttaatggaaaagacctcagcacaaaggtctggaaggaatggtcacgcaccagagcaggaaaacagctgcgctatgtgactcagtttccagggtttcacttttccctgtcacatacgtcagtttagaaggttgttacactctctttacttttcacagactccaggtaactacttggtttcatacgacaataaacaatatggtgtttggtagaaaaatacagttagatggaagggataagttccagcgtttggttgcacggtaggatgactacaattaacaataatgtatagccgggcgcagtgactcatgcctgtaatcccagcactttgggaggctgaggcgggtggatcacctgaggtcgggagtttgagaccagcctgacaaacatggagaaaccccgtctctactaaaaatacaaaaaaattagccggtgtggtggcgcatgcctgtaattccagcactttgggaggctgaggcaggagaatcacgtgaacccaggaggtggaggttgcggtgagccgagatcgtgccattgcactccagtctgggcaacaagagcgaaactgcatctcaaaaacaaacaaacaaataaacaaaaaaccaataatgtattgtatatttcaaaatagctagaggagaagatttggaatgttcccaacacaaagagatgataaatgtttaagatgatggatatcctaattatcttgatctgatcattacacattttatgcatgtatcaaaatatcacatgtactccataattatgtataattatgtacccataaaaaacaagatagtgatattttgtataaaaatcagtccaattatcagccccattattattgattatattattttatgccctaatcgaagtatataatgactacagcttcttcctcaatctcaatttagcagtgttaatagaggaacttcaaagtcaaggaaagtcaaaatcaccccgaagagatggtaagaagagagtttattctgttcataagggaacaagtggcacggatggtgggcaggagaatttggaagcaaaatccacagcaggagataagacaaaaagtcatacttaattctgaattagtggcaagatccaaactctttctctcactctagtttcgtattgttttccagcaggccactacctttgcttgtctttgagaaactggaatgaatacaatgcctggcttctcccaagagtgactggttttccttaattgtcccttttctgacttgaggccacagagggagaacctttctaaggtttgcgtttccagtttttggctgactgcctgcctctgttccctgccagcttcctcacttcttggactgttatgtcatcaatctgagaaatgggcacaataaaagagagaagaggcagttgaggctggtttcagagagaattttaagagacttcattaggaagaagagagatttggggcaggtgctatatatgtgagataaagagataagggagaaagagagatggggatgcaccttttaagaagtgttgctaggatgggcatagtggctcatgcctgtaattccagtgctttgggagaccaagttgggaggattccttaaggccaggagtctgaggccagcctgggccacttagcaagacccttgtctctaccaaaaattcaaaaaattggccagatatggtagcacgcacctcctagctactcaggaagctgaggcgggaggatcctttgagtccaggagcttgacgttacagtgagctatgattgcaccactgggtgacagtgagaccttgcctcttaaagaaaagaaaaaaaaaaaaagtggccgggcgcggtggctcacacctgtaatcccagtagtttaggaggtggagatgagcggattgcctgaggtgaggaggtcgagaccagtctggccaacatggtgaaaccccatctctactaaaagtataaaaaaattagctgggcagggtggcatgtgcctgtaatcccagctacctgggaggctggggcaggggaattgcttgaaccagagaggggtgggggttgcagtgagctgagatcgtgccactgcaactctagcctgggtgacagagcaagattccgtttaaaaaaaaaaaagtttctggacatcatgactcatgactgggatgtccctttgttattttttaaggacattggtaaaaatttaaaatgtctttcaaatatttttggctagtatagtagtgtttctttggaacaaactctgtgcagagactggtttgaagttgacgggaaaacaattattttatgagggctgcgctaacaatgggcatccttgtatatacctatgtcagtgtacctgtacaggtatacctgaagggtaaagtcctacgagtgaaattgctaagccaaaggataagtgcattcaaaaactagaaagatattgccaaggttgtcctgaaaaatactgtatcaatttacactcctacttgcaatatatgagagaccccactgcatttgtgccaactctgggtgttagctggcattttgtagttgcttgtataagtaaaaatggggtccgcattttcttctaggttgaccattaacaaactaaatgtccatcaatgggcaatggctaagtaataaaaaaatctattgtatggaatattatatacagctaaaaattgtatgatgaggatctgtatatactaacttggaaagagatccacaatacattatcatttgaaaaaagacaaattaataaacaatgagctcatcacaattcctttttttataaaaggagaaaaattctctttttgagtttgcaaggagaatagggaagattttgacatcttgatttcactcagtttttttttttttttttgagatggagtctcactctgttgcccaggctggagtgcagtggcgtgatctcggctcaccgcaacctctgcctcctgagttcaagcgattctcctgcctcagcctcctcagtagctaggattacaggcgcctgccaccacgcccggctaatttttttgtatttttagtacagacgggttttctccatgttggtcaggctggtctcgaactcccgacctcaggtgatctacccacctaggcctcccaaagtgctgggattacaggcatgagccaccgcacccagcctgaagacaggttttattttgggcaacattcaagattacttggagtcaaatttgattaataaggtaaagatcaaattttgcaacataattactgttgaaaaatagttatgctactataaatttataagatctgctttgtgtgaatcataaatgagatgtgaaggtcattcccaacttcacattttctttttttttttttgagactgagtcttgctctgtcgcccaggctggagtgcagtggcgcgatcttggcttactgcaagctctgcctcctgggttcatgccattctcctgcctcagcctcccgagtagctgggactacaggcgcccgccgccatgccgggctaattttttgtatttttagtagagacggggtttcaccgtgttagccaggatggtctggatctcctgacctcgtgatccaccctcctgggtctcccaaagtgtggggattacaggcgtgagccaccgcgcccggcctcaacttcacattttcaaaaatatgtgtagcattgaaatcacatctgttgcattcaaaatatgctcacttagaggctaatatactctttactcaatactagcattttattaaaaacttgttttattggccggctgcggtggctcatgcctgtaatcccagcactttgggaggccgaggcgggtggatcacgaggtcaggagatcgaggccatcctggctaacacggtgaaaccctgtctctactaaaaaaaatacaaaaaattagccaggcatggtggcggacgcctgtagtctcagctacttgggaggctgaggcaggagaacggcgtgaacccggaaggcagagcttgcagtgagcagagatcatgccactgcactccagcctgggtgacagagcgagactccgtctcaaaaacaaaaacaaacaaacaaaaaaatttgttttattaaattgtttctagtatcagcatttctaataccactcagggtgcctgcctgtatgatggcatacctgttgggcaacaaagacctcaatgtgcttcgaagtttgaatgcccaagtacttaatgcatacgtacttaatatttttcatagaacgccgattttttaaaattttcttttttttgaaaaagcagatgatgtggagaaagcacaaaaacaaggacaattggaaactcctggaaaactgcccagtcacccaaagaaaaagtcttggaaaatccctatgtcacctgaccaattcctcctgactgttagcgccctgcagcacgcccataattccggggaatttgcctatccctgtaggccccaaacagaaattactgatgtctggggaccttcaatttcatacccaaggaaggtcttgaatttcaaaggaaaatcaatccaacgtgcagttgatcggttgagattgagcaatcctcctatagatgtgaaacgaaccagtattccccttgaaatccagaaactgcagcccaacttgaagatctctttgcacagtcctagagtccagtccaccataccccagcccatgattatccgctccaggttctctggcagcttaaagggtggagaccaagtgaccagttcaattgaaagggctgtgtgcagtacgggtcccctgaccagtatgcaggtcattaaaccaaaccgcatgctagctccacaagtgggcacagccaccctgtctcttaagaaagaacggcctcgcatctatacagcccttgatccttttagagtgaacactgagttcgtgctgttgaccgtgaaggaggagaaggagcaccaggaagccaagatgaaggaatatcaggccagggagtccactggagtggttgatccaggaaaagtcagcaaagctgcatggatcaggaagatcaaaggcctgcctattgataatttcacgaagcaagggaaaacagcggcccctgaacttggacaaaatgtatttatctaaaccagccttgggaaattacaatgttttacaataaacagaaagccaagcggatgttgctatttggcctttttttttttttttttgactgtttcttcctggtaattaatgtgggaactcccagttatcttcctctgagccaaatatttgatatcatcaaaataagaaaacagaaggaggttgggcgagattagcatctgtagtcccactgaaaacaatttagtgagcattaggaaagcccagtttcgttgatgggggatggggagatgatcactggaaattagataccattcatcactaccaatttagtgctattagttcttctggcaaatgaagttatgggattatatcagggtcatgcattggtgttttctggtatttttgcacagaagcctgataaaacccattaagaatttaaaaggggaagccctcagtggggtggacctgttgcatttgacaacattgagcttttccttctcagggctaactcctaaggaagagaattagcatatttatcctctgtacaaagagggccagtaacatcaagtgcattgaggtttctgcttaaacctttggactatggtgcagggaccaggtaatttagaagagtgcagcccactacaagagctatggcccattagaaagttcaagccttgaccaggtgcggtggctcacgcctgtagtcccagcactttgggagactgaggcgggtggctcacctgagatcaggagtttgataccagcctgaccatcgtggtgaaacctcgtttctactaaaaatacaaaattagctttaaaaattagctattaaaaattaaaagacgataatgaattcaaacacaatgtcttaaaaaaccaaaaactacgaaaaacaacacaaaactccacagcactgagtggaccactgaaaacctgccatgggcaggctggacgtacaggccccaaatttgttagcttttcatctccaagggcacgaatgcaattgtgctgccgaaatgtcttgcctttagaaacgcgtgtgtgtgttttccccctttcattattagaatatcaggttttaaatggcactggcaatcagccacgtaaaatttgtgattttaatagaatcccttcaattaaggacacgtgcaaataccactatgccaacagcagtctgactcggccagacagataggatattgtcatcatcaccgcttcaaagatgacttaacgccccttaatttcacatcctttgttcaggcaagatcacagcatgagcggctggacttaaaactgtagtaagtataacgtctcccatttactagatacttacactgtaaggaaaccattatcacccccactttacaactgatgaaagaagtacataaaggttggtgatatgattggcaatagagttcccaggcgcctaagctccagggcgcaaggtctcaactcctggcgtctaagtttatacctcccataataataccgtccattagttactctagagtcctcctgccttgtttttcttaacgttttacttctctgcaagaacatattttaaaaagttgcttctacaatttaaagtacaaaagtaatactgtacaggagtaagtctttgtaaaatatttaaagaaaattatattatacaataaaaccccgcccccctgcattcggggcagcgacactgggggaacgactttagaatttgcattgggtggacagcaaatacttccgtaaaacagaccatgaagctttccacttagagcccactgtggccccaatacctttccctttcgctcctgctccaggctccgcctccgccgtgtccgggccgctcgccccgcccccgctcgccccgcccctggatttgctccctcaaagcggaagtgaggccggactgaggctcttacagtggtccctgctggcccttggtgacgggtcgcctcagttccgacccggacccgtacgctgctgcgctgacgtggctcccggaagtagggctggcgtagggccgccatgttgcagcaggtgaggggctgagggctcgctgggagggtggcggctcctgggactggctctgcaggttccgtgggactggagcccgcgtcccccgcgcccgctactcgaactcgaggaggagcggggcggccgggagtggagggctgtgggtagttgtctgaggagggctgctgggggttctgaggccgctgggggcggcgtgacccgtgcggcgcagagcaagtacttcttgcggctgtggggacgcccattgttaaccagcgcgagtgggggtctctctttcctcaacccttattgccggggtggagttgaggaggagcggcctgcgggcctcttagcttcctgacacccaggggtgcgatgctattttgtaggaatcggcgacaccgccagagcctcgctttcaaattgctgtttccaaactaatgttgttggtgattctctcctttgtgctcttagagttaattgtagtccacatgttggcaaccagagactcgtaagattaataatatttttagaaaaaactactgtttatggtcacttagattgtcttaagtgtttttttctttcggttcacacaaaatttgttgagggattactatgactcagacacggttgtaggcccagggatagggttgtgaccagtacagacaggtttcttgccccgtatttttgggttagggaagtgggttctaggagatgggggttgggtggggagacacgataaattgtataaccaaagatattttcagataattgcaaaggcagggtgatgaaataacaagtgtctgaggataggacaactaagatttatggtcaggaaagactgcttatgaggagatgccttgagtggagaaaatctaataatggttaaattcagctgtattacaggaaaggtgtcccgatccagacccgaaaagagggtccttggccgggcgtggtgactcaggcctgtaatcccagcactttgggaggacgaggtgggtggatcatgaggtcaagagatcgagaccatcctggccaacttggtgaaaccctgtctctactaaaaatacaaaaattagttgggcgtgatggtgcacgcctgtagtcccagctactcgggaggctgaggcaggagaatcgcttgaactggggaggctgaggttgcagtgagccgcgggccactgcactccatccagcctggctacagagggagactccgtctcaaacaaaacaaaaaaagtcttggatcaggcaagaaggaattcagggtgagtccacagtgcaaagtgaaagcaagtttattaagaaagtaaaggagtggctactccatagagcaacctggagggctgctggtggcccatttttatgggtatttcttagtggtatggttaacaaggggtggattattcattcctccccttttagatcatagagagtaacttcctgatgttgccatggcatttgtaaactggcatggcgctgatgggagtctagtagtgaggacgaccagtggtcactctcgtggccatcttggtcttggtgggttttggctggctcctttattgcaacctgttttttcagcaaggtctttatgacctgtattttgtgccgacctcacatctcatcctgtgatttagaatgccctgtctgggaatgcagcccagtaggtttcagcctcattttacccagctcctattgaagatggagttgttcaggttcacatgcttctgacatttgaacctgcgcccaggccggatgaggctggagaaacacaacaatgttgactgttcccactatttatttatttattgattgattgattgattcattcattcatttatgagacggagtttcactcttgttgcccaggctggagtacaatggtgtgatctcggctcactgcaacctctgcctcccggcttcaagcgattcttctgcctcaccctccagagtagctgggattacaggcgcctgccaccacgcccggctaatttttgtatttttagtagagatggggtttcaccatattaaccaggctggtcttgagctcctgacctcaggtgatccacccgcctcagccttccaaagtgctaggattacaggcgtgagccgccaggcccggccgacggttcccacttgataaatttgtgacgtgaacctcagtcgagcccttagtgctgccaggcggtcattctacatttccatagccccttcaccctctcgccttaggcaactattaaaactcaaatcttcaacgtttcttctcttatcctctctcagctggtaacgttgcttcttgtttcactgaaaatggaagccgtcggaagacaattttcacactagctgcctagttgcatgtttactcagggtctcatattcttttatgataattggactgttagtgctccattcttaggtcttcctgtctactgtgtcctggtttccatctcctcttgcctactggaaggcattgttctagtaattctctttcttgtatcatcagttttttaatccttttaaacgtttgctcacatcaacatataaacgtgctttaatttctcttaccttaaaaaatgaaaacttggccgggcgcggtggctcacgcctgtaatcccagcactttgggaggccgaagcgggtggatcacgaggtcaggagatcgagaccatcctggctaacacggtgaaaccccgtctgtactaaaaaacaacaaattagccgggggtggtggcgggcacctgtagtcccagctactcgggaagctgaggcaggagaatggcataaacctgggaggcggagcttgcagtgagccgagatcgcgccactgcactccagcctgggcgacagagccagactccgtctcaaaacaaacaaacaaacaaacaaaacaaacttgacaccacatgctctttcactggtcactccattctttttcctttaaagacttgtatcatatatgcttgtcttttaattcttccagtctctcttgtattcattctagtcagtctctcttcccctctcccaaccatactggaactgctcttactgagttccctgatgacctgttaaaaatacagtggtcatggctgggtgcagggctcatggctgtaatcccagcactttgggaggccaggatgggtggatcatgaggtcaagagatggagaccatcctggccaacatggtgaaaccccgtctctactaaaaatacaaaaattacctgggggtggtggcatgtgcctgtggtctcagctactcgggaggctgaggctgacgcaggggagtcgcttgaacccgggaggtggaggttgcagtgagccaagatcacgccattgcactccagcctggcgacagagcgagactccgtctcaaaaaaaagaaaaaaaatacagtggtctctctttggttttcatcttacttatgagcagcatttgacacagatgatggatcctcctcctggaggcactttgtttggtttccaggacactaccccctcctggctcaccttatgttccttggtacttctttttcagtccccacagcctattccttcttatctttgtgatctctaattattggaatgctaggagtctgtcttagccatctttatctttttagttgttcaggacaaaaactttggaatcttccttgattccttttatttacccttcctccacctccccagtcagtccatcagcaaatcctgtcagctctcccttaaaatgtacttggaatctatttttcatcacctccactgcatccatcttagaccaagccattacttcttggcctcgtgattaaagtagtttcctaaccagtctcctagcgttgtgcttttgtccctccttcttctcccctccccctccagatttttactacagtagccagaattctctttctaacaggtgagtcagaacatgcagtcttacacttaaaacactccaatggatctccctttcaacgctttttggttttagcatcttaaaatgtcatttagcatcttaaaatgtccaaaatcaaactgctgattttgccccgaaatcttttgtgtccgtggtcttccccatcttagtaaatgtaactccaggagtgcagagctatttgtcttttttttttttttttttaaatctgtaccacttacagcagtacctggcacttggtaggcactcagtatttactgaataaatgagaagaaatgagtctttcaaagagcagggtaagagaatagtgttctaggtaatatgaaccataagtgcaaaagaacctgacggggcccaagtttggcatgtttaaggaactgaaaagaaggccagcctgggcatggtggctcatgcctctaatcgtagcactttgggaggctaaggcaggagaattgcttgagcccgggagtttgagactagcctgggcaacatagcgagaccctatttctgcaagaaattaaaatattagatatggtggcttgcagtactcaggaggctgagatgtaggacctgcagtagtgacccctgattgctccactgcactccagcctgggcgagagccagaccctgtgtcaaaaaaaaaaaatggccagtctgggcaggagcttaggtactgtataaatttcctgttgctactgcggcagtgaagtcatatgtactgttgtaaagttctggtggtcagaagtccagaatgaggctcaaggggttaaacatcaaggtgtgggtaggggttctggagaatcagtttccttgcctgatgcagcttctaaacacctgggatcccttccccatcttaatgccatgagcacagcctcttcaaatctctgtctctcatctctactttgcttgtttcatcaccttctctcactgaccctcctttgtttcccttgtaaggaccattgtgatcacgtcatctgaccagcctgggtaatccaggatgatctcttgacctcaagatccttaacttaatctcatctgtgaaattctttttgccaagtaaatttacatattcacaggttccagagattagaacctaaacatttttgggaggggtgaggaggtattcagcctaccacagttaatgaagagtgagtggcctgagataaggtcttagagattggcagggaccagatcatgataggtcatgatagggagtctgtttttcagtcatagtgctgagaggtttcagtaggggaatgataggatttgatgtgaaaaagtctccctggccgctggatggcgattagactgttgggatcgagagcagaaggcctcagctttttattcataacatcatacggtggatctcaatcttgctgtacgttatgatcacacctcaaagcaattatatctgaaccactgagggctggacccaagtatcagcctttttttgtttgtttgtttgttttttaagaaaaagcattctaattgtagccagggttgagaaccactagtctcatagatctgaatccattttaccttttcagccttagctcagtaggagcttctcgcatccatcacttactgcatgagctacttgaccatttcttagacaaacttcctgtattcccacctgtgcctttcaaaatatacctagtctagggaggcctacgcggactgtcagggcccagctgacaaactctcctccagaaagcttctccagtgccctgtagtaggaatgatttgcttccttccctggctcccatttgcacttagatttctcagccctgatcacagtcagctgtatattatcgtctcctttgcttatttactcatgccttcaacaaatactgtaccacttggctgaatgctctgctagacactaggatttactacaatgcaaagacagtcttggttgggcgtggtggctcacacctataatcccagcactatgggagggtgaggtgggcggatcccttgaggtcaggagtttgaaaccagcctggccaacgtggtgagactctgtctctactaaaaatacaaaaattagccaggctaattagccgagacacactcctgtaatcccagttactcaggaggctgaggcactagaatctagcttgaacccaggaggtggaggttgcagtaagctgagaccataccactgtactccagcctgggcgacagagcaagactctgtctcaaaaaaaaaaaaaaaaaccttgtcttctaggtcctccagcagcttaatctatatggaggtaggagcgggtagatgtgcaataagaatactctgagatgattgttcaaatggagattcgtccaagtgctgtgggaacatggggatttcagagacaggttttcagctatttcagtatttgagctaaaaaacttgaaggatgatttggtatttggtggtgagcagggcatgaggaagggaagagttttctgagacaacatgtgaaaggcaggagatgggagagagattgtagtgttcttagagaccatgtagtaacagtattgcttcagtgctcaacagtgctcaatgaagacagtgtcagaagcaagtagggggcattagattctgtgatcttctatgctttatgtgaaggagttaaattttatcctatacttgtagggatgccattgaaaaatttgagcagtagagtgacatggtgtgatttccatattgggaggattgctctgggtaatgtaaaggagaggctggaatagagagggataaaggcagggaggctggtgagtgccactaggagaggaacaggatcaggtttgttgtagttgaggggaattgcagtgaattgaggcgtgaaccactcttagaagcctaaggttatggggccgggcatggtggctcacgcctgtaatcccagcaatgggaggccgaggcggctggatcacaaggtcatgaaatctcctggttaacacggtgaaacctgtctctacaaaaaaaaatacaaaaaattagccaggcatggtggcacgcgcctgtagtcccagctacttgggaaggtgaggcaggagaatcacttgaacccaggaggcagaggttgcagtgagttgaggccacgccactgcactccagcctgagcgacagagcaagactccatctcaaaaaaaaaaaaaaaaaaagcctaaggttgtaaaaggaagcaatgctttgggaaggtagaggattgaaggggagattcaggatcagggttcttaaaaaaatctttttttgcctaataagtggccttgaagaagtttatatgcatatgctgattagaaagattcaatagaggccgggcgtggtggctcatgcctgtaatcccagcactttgggaggctgaggcggacagatcacctgaggtcaggagttcaagaccagcctggccaacatggtgaaaccccgtctcaactaaaaatacgaaaattagctgggtgtggtggcacacgcctgtaatcccaacaacttggaaggctgaagcaggagaatcgtttgaacccgggaggcggaggttgcagtgagccaagatcgtgccattgcagtccagcctgggtgatgagcaaaactccatttcaacaacaacaaaaaagaaagatccaatagatagacttgaagatagaagaaagtgtaaatacaggggaaaatgatgaaacaaatccccgaggaggcatgaaaagaagttattctgagcacaaataattggtttagccttggataagaagaggaggagttgtgagaaggggtcatggaactaaggatgcagtcagatgattttgtgaaggagccagaaaccttgagattatccccagtagcctcggcttgctctgtgacttgggagagaacaggtgaggaggacaggtgttaagttgtagtagcctcatctgcaccctagagttttctcagatggtgcagcctaggggcagggatggaggagctgagacttcgattattctctgggttttttgccagatgatttgaggaggcgggtggaggatctgcatgtgtccttttcctaggttttgaattcctgatgctgtaaccacattattttatcttctattttgatgagtatgcagctttgcattgcagtggctgtgtaaacactgaattttgttttgcttcttgaccatttatttttcctaccaggatagtaatgatgacactgaagatgtttcactgtttgatgcggaagaggagacgactaatagaccaagaaaagccaaaatcaggtaggaggagagaagttgcatgagctgtgttagtgtccagtgctgttctgtatgtatgtcagtgctagctgatgggagtcaaggcagagttgtttcaatgtgcttgtgaatactgcatgttgctaatttgacgtttagtgtacgacaaagatgacatttcagattttcttgtgaataattggcatacttaatactgagttttaaaatcagcaaatccaattatttgaacacctgtgtttttaattctgtgctattttccaagaatgtaccatttctttatatagtttctatagatacattacattttgatttattgtgcacatttcaaaatcacataacatttctattctaaatttaattctctctaaagaaattcacttactgaaagcaaattctacttgaaccctgctaaaatgctgtcttttacttttctttcatctttcatgccagtcacaaaagaccacatattgtatgatttcatttatatgaaatgtccagaataggcaaatctgtagagacagaagatagattagctgttgctagaagctgaggggtttgaaggtaaatggggaatgactgccagtgggtacaaagattctgtctggggtaatgaaaagttgtaaaattggagtgatggttgtacaaatctgtgaatgtactaaaaaccattagattgtttaccttaaataagtaaattgtatgatatgtgaattatatctcaaaaaagctattaaaaaacaagaaacaggctgggcacgatggctcatgcctgtaatcccagcactttgggaggccgaggcaggtggatcacgaggtcaggagattgagatcatcctggctaacatggtgaaaccccatctctactaaaaatacaaaaaattagccgggcgtggtggcaggcgcctgtagtcccagctacttgggaggctgaggcaggacaatggcgtgaacccaggaggtgaagtttgcagtgagccgagattgtgccaccaaactccagcctgggcgacggagcgagactccgtctcaaaaaaaaaaaaaaaagaaaagaaagaaagaaacaaactacctgataactttgtcttaatgtctgagtgatttctgagggctaaggaattcttttggtgtgatttgaaaataggattcaaattctaagatacagtttccttatttctccaagagagataaaattctttattatctattttgtgaaagtttatattcaatgaggtgttaaagtcatctgtgcatagtgtattttctgtaactacagggcctagtcaaatagtggggcttaagaaaaagagagctaggaggtttgcttcatcctactaaagtcacctcttttattttgacaaaactcttcacagttacacgatggctaaaacatttttctctacatttgctagtacctgtagtaaaatgtaattgcatttctttcattgtgttttggttttcagacatccagtagcatcgtttttccacttattctttcgagtcagtgcaatcatcgtctatcttctctgtgggttgctcagcagcagctttattacctgtatggtgacaattatcttgttgttgtcgtgtgacttttgggcagtgaaggtaattttgattgtttttattttaaaattatatttaatatgaaaatgatgtataaaaatatgagttagcattttgcattattgttaatcttttgttacttcaaacctcatctgtgttgaagtgctagatatatcaaattgcatgtagtttttttttttttttttttttttttcattttttccctttgacaatacaagatgagacatgcaggttactgtgctgctgatttttctgtgccatattctaacctacatcagctttaaagtcaaataaacaaacaaaagtgactagcaaccatagaccctacaatgttgcttctaatccataccatgggttttgcttcaggcttacctgtaggtgtgttgtatataatttctagataaggccccagtgtagtttgtccacaaatacctaaaaaatacctaccttttgaaaaggctcctatggatgctttaaggcagtgtttctcaaccagagacaagcttgccacccactgaatatttgtcagtgtccaaaaatgtttttggttgtcatgactggaggtgggaggagtgtgctattgacatctagtggctagagggcaggtatgctgctaaatatcctaacacacaggacggcccctctgcaacaaagaactacctgacccaaaatgtcagttgtgccaaggttgagacaccctgctgtaggggatagaaagaagtgtaagaaatggtttcaaactcaagaacaatgattagagagatggatggatggatagataggtacataataaatagataagtaagcataataaaatattaaatatggactctagatgatagatatttgggtattcactgtaaaatttaactgtgtgtgttcgaaaatatagtaaaatagtggagaaaaaaatcaaaggctgattttggagtttcagagacacatactgattcaaagactagtaagatgttacaaccctattcacacccaccaatgtagccatttttagatcttttaattcttttttttttgagacggagtttcacttttgttgcccaggctggagtgcaatggcatgatcttggctcaccgcaacctctgcctcctgggttcaggtgattctcctgcctcagactcccgagtagctgggattacaggcatgcaccaccacgcctggctaatttttttgtatttttagtacagacggggtttctccatgttggtcaggctggtctcgaacttctgacctcaagggatctgcccacctcagcctcccaaagtgctgggattacaggcgtgagccactgcgcctggccatcttttaattcttaaagatacctgaagtggttggcttggtgatggccagtttccataggccgcataatgctgagaaggaagatttcaaaggtctgttttctttaggtttttctgttgtccagtcttctttggcttgcatttctttgaatttcttctgttactttatgctccaaagtatttagtacatactgctcacagttttgatacacgtttctttttgttgttcataaaatttctgttcagccaaatagaacatgctttccagtcagttcttcctggtaatttccaaactcttaaaatttttctgggtttagagttttaaaaaatgcgatcaaaatagtttattttctgataaggtttatttgtttatttttgtttttaaacaagggcttaaaaaatggcacccttttatccttggcaaaactacttatagatagcaaagcaatggagatataaagcaaaattaagaagtcaagaatagggaaattattaagtggacttgggataagcagggttctgaaacagttaaaatagagatgtgtcgtaattgttataaatctcaatgtacttactaaaaaaacaaaaaatcaatcttcatctaaacccctaggtgtccaatcttttggtttccctgggccacagtggaagaaagaattatcttgggccacacataaaatacactaacattagctgatgagcttaaaaaaaaaatcgcacacaaaaaaatctcataatgttttaagaaagtttacaaatttctcctgggccgcattcaaagctgtcctgggcagcatgaggcctgtgggcagagggttggataggcttgccctaggtgatgttaatgaagataaagaagaggtagagaagggaaaataatttaaaggtatgcttaaatgctaaagcttatattggtttttattttattcttcactctgacaaattgagtaaaaaaggttaaataatggttttaaaaatttaatggcaactatggctgggcgcggtggctcacacctataatcccagcactttgggaggctgaggcgggtggatcatgaggtcaggagatcgagaccatcctggctaacatggtgaaaccccatctctgctaaaaaaaaaaaaaaaaaaaaaatgagccgggcgtggtggcaggtgcctgtagtcccagctattcaggaggctgaggcaggaggcggagcttgcagtgagccgagattgcgccactgcactctagcctgggcaacagagcaagactccatctcaaaaaaaaaaaaaaaaataatggcaactattagtaaaatttaaaaccagtcgtgtatcttctgcaacattggagaagatggagcaagtaaaacagttcatagagcaaaagaaggaaaacaaagcaactgtcaaggaagcttaaatcagaaagtacatgtataaagtgatgtaagtaatagcaaattcattataataggaaatgtaatttgattaaactacccatttaaagacaagaatactaagattggtcagaaatcaaagtccaaacaaaagatctaacaacattaatgacattagaaaaaataaaagaaggcaaagataacatcagatcaactcaaacaaaaagaaacttggcattgtattattatcagatgagatatggatcagagtaagaaagcactaagaggaacagaaaaaggtgattttatgaatcacagtgaagatcattcacagagtaaaattatatcaaactatgtatagtaaaaaaattggaaatattagaaaatagaaaagcattatgatgagtttaacaaactactatctttaacaaaccaaagtgccaaaaaataaataagttctgaaggatctgaatgaaataattggcaacatcaatttgatagcagtatttgggactttgtatgacagaatactttcttgttaaatgcctgtggggcatttacaaaaattgactaaatatcactgtgaagaaaatcaaaataaaattgcccaaagcacctacattttctactccaatgaaacagaactagaaattaatagaaagtagttgtcgaaattggaattctttttaaaaagcgaactactacatatcttgggtttaaaaggaagcaaaaactgtaaatataggttatttataccttaatggtgatcatttacagttaaactttctgaatatgtcaaaaactgaattcagagggaaaataatagactaaagccttttattttagacaagaaagagggaaaataatggactacttgagtccagaaatttcaaaaacaagcaataagcgtgagaaatcaggaaaataaactaataaagataaaagcaggaaataaagagttagaaaatgggaacacagaagagtttgaaagtattctgagagcattctttgaaaatacctatagaagagacctctggtttaggtctcccttgccagctcttttttttttttttacttagcatctctcccataggaattttggtctcataagactcttccttttcttctcctgtattcccttcctaaggagtgccgtttatgcttctggttttaattgctgatctgtaagctgtgttgcctcccagatctgtatctccattcaggtttgtcctcacaactcaaggcctctccatgtgtcttcttgacgtttttatgtggctgtcttgaaggcatctcaaatctttttttttttttttttttttttttttgagacaaaatcttgctttgtcacccaagctggaatgcagtggtgtgatctcggctcactgcaacctctgcctcctggggttcaagccattctcctgcctcaccctcctagatagctgagactacaggcatgcaccaccatgcctagcgaatttttgtatttttagtagagtcagggtttcactatgttagccaggctggtcttgaacccaagtgagccaccatgcctggccaggcaacttatatcttaacatgtgtaaaatactacttgtcatcttccactccccaaaagctcttcttctttgagtgttccctttcgtggggcctggaatcactatttttttacttgagcaaaccagaaatgtatcagttgcctccttcctactccatatccaattaatgaccaagtcccataaatccatagattgtactttcttcattagggcatcagtgcctgctgctctatctggaatgctcttcttcctcccacatcaccttcatacagggattcctaatctttttatgccatgggtccctttcatagactcatgaataagttttcacatatataaagtacataagatttcaaaggaagtcacttatattgaaatataatttaaaaatattagaaaagtaaatttctgattgagttatatgtgtagtagttcccccattatctgaggtttcactttctgcggtttcagttactgctatacactacactaaacagtaagatactgtgtgaggagagagaactacattcacataacttttattagattatgttgttataattgttctatttttatttcttattaatctcttactgtgcattatttataaattaagcattatcataggtatgtacttacaggaaaaaatatagcatatataaggtttggtattaaccacaatttgaggcatctgctgggggtcttggaatgtatcccctgcagataagggaggactactatactttatgaatttattaatggtaagatctagtggcaggtctaataactactttcaaagcagtggtgagcgtaaacaatatgttaagataactgcagcaagtatagtacaaaatgaaaaatgtctgtggtttctattgtgtcagggtgtttttaattttacctatattcatagtttgttgtctacattcataatttaatgatatgctaactactttcaaagcagtggtgagcataaatagtattttgaggccgtgcgtggtggcttacgcctgtaatcccagcactttgggaggccaaggcgggtgaatcactgaggttgggagttcgagaccagcctgaccaacatggagaaaccccatctctactaaaaatacaaaattagctgggcatgatggcgcatgcctgtaatccctgctacttgggaggctgaggcaggagaatcgtttgaacccgggaggcagaggttgcggtgagctgagatcgccccgttgcatgccagcctgggcaacaagagcgaaactctgtctcaaaaacaaaaaacaaaaccaaacaaaaaacaaaactacaatattttgaggtaactgcagcaaatatagtacaaaataaaaaaatgcctgtgatttctattgtgtcagggtgtttttaattttacctacattcatagtttgttgtctacattcataatttaaagatatgctaaattttagccagaggttaatgaaaatgaaggtaacatttttttttaacccatcgaggttcacagaaccactgaatctattagtggacaccattaattaaacatccatggtactgttgattcttatttatcttttatatttcattccaaatgttgactcctcagagagtcattttctgatacccagactagatccaatttccctgttatactcttcaagcatctcacacttttcccttgcaggacttaactcagttggtaatggtacatttgtgcattggttgtctgcctctcttcacctctttccctgaggaaggagttggtatctgttagtcactgttgtattaccagcacatagtagatgctcagtaaatatttgttgagtaaataaagattaggaaagctatcaaactaatttattaccttagtaagtaggaaaagagcttggtaacttgagagactgactgaaggccagtgtctataatcattttcagggatatgtagttgtaaaatacatgtagctatagtcaggatgtaaagtaggtcacagtaaccaaatagcaaggggtttagggaaaattagggaactggagaaagggcaaattgttcatgagggaaaagagaaggtgtaatgtttatgggtggacttgttgcttgctctgtcacctctacccctattagtcctgccattaccattttacttaatcacttagccaggcctgatacatagtagtctttgctaactggatattatggaggtaaagctgaaggtttttgtttgtgaaatgttacactaagataggagcttgtgatagatctttaaataatgcttttaaaatgtgcctgtttatattaatcttcaccagaatgtcacaggtagactaatggttggcctacgttggtggaatcacattgatgaagatggaaagagccattgggtgtttgaatctagaaaggtaaagtgccttttttgttttaaataatgttatcagctaaattatttgtagactatatttaaatactggaagatgaagtattcagaattaaaaacactataccaaatcacttggcatgtcagcactaaaggagatggccttctagaatttaatgcatttttctgtctagttcagaccagaaacaagcaatatacagaacagaatcctttgagggaagacactgggtctgagttcatacagtgtgctaagctgcctgtcagggattgctgataaaagatctctgtgttgcctttgttagtgtctccataaatccctctatgctcagcagataactgcttttaacatcttgttctgtctttgctcctgtggtcgtctttcatttctgggcaggaaaaaggaggaggagtgcagctggatagaatatctgatcggagcactctattcctaagcttctgccttcaggagccctggggatcctggtctgttttgggttagcctgctacactatagtgaatattcactttccttgtggaaataagttttggaagcagaggaccaaattcttggcgacagtacaccaagggtattgacaagttattttaagaaagtggcactgtgttcaatgagcctgtattcttttatattatagaatctaccttggaaacaacttaccacccttgtaacttcctgggtattgctaagacattttgattattgtccagaatcccttgattccgttttttttttttcctctggaccctaatttgaccttttagtctccagaatgattataactgtgatttccttgatcattggtaggaaaggtatcatttagagcttccttatgaataaatagtacaagtgcaagaagaattgaatagaatcctatcagagaccactctttactgtcatgagttgtggtaaaccatccatcctgccctgaaaatgcaaaattcttgagttaatatagatcagttcctaaaattacaagagtgatagtcatgtatttttgggttctaacttaggagttgggctgtgtgtattaatatttgaacttgtgggtaatatgttttttattaaacatgttgaactttttattgataaatttcacaacatgataattgaatttatgttcttttataggagtcctctcaagagaataaaactgtgtcagaggctgaatcaagaatcttttggttgggacttattgcctgtccagtactgtgggtgatatttgcttttagtgcactcttctccttcagagtaaagtggttggtgagtatcagtgtagaactttcaaataatccattaagatgtctgatggtaatcataggaagcaacaactacaactgagtccttatcattagggacctatcttgaataggcagcttcatcatgtaattcccaagttttgcttcccaactttacctttctctataatactggagaagagatcctaaaaaaccccttcccaccagttttctagattattagtggtcttttctggaaataatggttggtaacctattgctgcctaacaaatcactccaaaacatagtggcttagagcaacaacagccattatctcacagtttctatgggtcaggatcttgggaagggctctgctgggagattctggcttggggtcttgagtagttgtagtcagacagtagttggaatgatgggggttgtgagccatctcctcttcatgaggtcccatggcctctccacatgtttttccctgtgccttcgtttgggcttcttcatggcatggtggcctcatggtggtgggactgcttacgtggcagcccagtacttcacttgtggggtgttctagctcgcaagcttttacaatctagctaagatgtcatagcatcgcttctgctgcccactcacattcaaggaaatgggaattaggctctgctcttgataaggaataagaaggtgctagaagactttgtggaagaggagatattgttgctgctgtctttggaaaatatagtttgtcacttgacccaatttgtgagtcttactcttttttatatctcatattattttttcttattctatcttatatctgatatgaataaatattgtgtgaattttcacacaatatttattgatatcagatatattttggccttaattatgtttttcctcctaatttgtagtattttcttagtcctattttgcgatatagattctttttttctttgtgtgtgctcatacattcatactttccttctttggatttggaagcttattggaagcttattgtcttttttcagttcttctggtagttacctttaattactttatatgtttatatcattaccctctttcatgaattaggaaatttattcagtatttatggagttcctgctctggaaaatgggaaactttacgctaatatggtttctttaacttctccctcctcctacctctagagttttgcttattatagtcttattttagtccttctagtggttttctttgtaacattaattaatgtacttaaacctgtttattgacttaatagactctgtttagaaagggaagaaaataaacactcatattccttcctatgagtttcctcctttctctcttgtttgttccaatgttatttttgtgttaccaagttttataatagttatcttttgaaaacatatttcttactggttgtttagtctttgatctgttttttaaaaaagtcgattcattgcctatcaccagtcttactgcagcttctccttttacttattggttggctacattttcttttgactcatgtttaaacatatgagcctattgactattcttaaatgatgacctggctggattaatattcttgggtcacagtttgtttctttttggaagatgctattccatcattttctttcactgaatatcttggagaagtctgaggccaggcttacttaacctttgtaatctctcctcataaggtgtttttttttttagttcatgtaacccagatgtatctgtatttatctttccatatcaagttttctggagtctgtgcctttctgacaggcagaccaaagttttgcttggaatcaggaaaattttttctgttaaatctttgcatttatttatgttctatggtttgacctttcattttgaagtaccagttacgtttatgttggatcatttttatttgttctcatctactattttcttgttgctttaattattcatcttttccttatttattcagcaattttaagagttcactcttatgtcagagctgtctggagacacagggggataagttaggggacagtaaacaagttgactgctccagtagagcttatgttctagtggaaggtagacaaacagtaaaaaatacaacaggggatgttagttaatgatacaaagtaatggggtagagagtgcagaggagagaacagtaactattttaagtgctcagctaaggcttctctctgtatttccttagctttgtcagctccgttttcatctcctgttatctcaccctcatgctttttgagttcttttctttaggtttttctgtagggtgaaatagtccgaggaatgcttttattttggtggggtttttttcttttcgagtagattcttcacctatcttctgtatactatgcttcttttttcttttttcactatagttttgcataaatgcacttccctttttccttatccattttgcttatccttacagtgacagtcctgtccagcccttctctttctgctggtttagtgcgggtgaatcccccttgaccaccttctcctgatgtctgaggcacgtggctgctgctctgagctggagttgcagtgctgggtttggtggcctgaagacacaggtgtgatgtgcgatgtggagaacttgccaggctcttgctctcttggctgggctgcctggttttgcgttctcttccttagtggggctcttgtctgctggttggctgtgcactctcttctggttcttcccttctgctttggattgtttgtaagaccttagagctttagcatccatccaagagagtcagcccagtctttttctagcagtgtttctacttccttaaaacaaaacagggagaggttatgtgaaagccagtttgatcctgtgttaacctacttatgcctagtgttccattattggaacactaagcatgtaggagttatttatatcctactgctcaaggtcatcaccaaggtctgatttttcactcatgcaaaaattcacaaaattgcagcctacagcataaatgggttaagacctcggcatggtggctcatgcctgtaatcccagcactttgggagggccaaggcgggcggatcacgaggtcaggagatcgagaccatcctggctaacatggtgaaaccctgtctctactaaaaatacaaaaaattagccgggtgtggtggcaggcacctgtagtcccagttactcgggaggctgaggcaggagaatggagtgaacccaggaggcagagtttgcagtgagccaagatcgtgccaccgcactccagcctgagcaacagagcgagactccatctcaaaaaataaataaataaaaataataaaaataaatgggttaagaccacaggacgggaatgggcttcacccagtctctccatgagtctcccacctcctcacttctcttaagatgatcatctctcatgattaatgatccttctgcgcttcctctcctgccttcttcccacccggtggcaccactatggccagctgcagggattttcctgcctgtttgggtcattgttagttgggaggagtttctgctgtcatggctgtttctgcatttttttctcgggtcttttgcttttctataagttcctggggatggtaattagtgaaattttccttagagcttctttgcagagtttggagctatgtagagctgctccaacctggctctttctttggccaccagcccttttttatgtttgttggtattagtttatttgtgtttttaaaaatgctgtttgctgtttgtaccttaaggggagggagatcttcatgtctgacttcactgcaccatcttaaaccagaagtttaacttacagattttaacatttgttgccattgagtaaatcgatgccttagcaggacccatgattggtctttgaattgaggtgtaccctggcatgttgatatatacatacccagcagtgccccatttgagaagcatgggaaattaaaaggaaatttattcaaataaatacacagttttatatttatttaggaaactagcaccctcttattacactaacacgtttaattccatgaaacataagtttagaacagaaagtaccacctcctcttcttttactaggaatgtgaaacctgttcattaatcaaacatttaaatctattaattaaacattaaaatcagctatacatcttgttaagggtaaggagaataaatctagattggaaaacgacatttcattgagctgctttgcttgtcacagatataaaagagtagaatggtcgatgagctgtttattccagaacaagggttggcaaactatggcctgcagaccaaatccagcccgacacctgtttttgtaagtttttattgaaaaacagccttgcccacttatatattgtctatggctgccttcggattagaacagcagagttgagtaattgcaacagagaccgtatggtctgaaatatttatgatttgaccctttacaggagaactttgctgatccctgtattagagtctttaaccttgggaatccctcacattgtctcaatttttctaattaagattaattagaaatttttaaagaatgggttttgagtttctttttctcacttctcattgatcctagtgggatgaccataggtgagaaaatgaaactcaaaggaacaaacagctctgcaaaagtacagttccccttggagctgtctccctgctcggggaaggcaggcatcggttgatttatgccttagggcattgcatcccctctaccagaagccagttgtcacgtagagcagagattcacccctacctgctctcagtttattgaacttgatctacctcttgactgttcttttgtaattcttataggaataattaacatttgaacctttcctgagtctcatttacttttcctaactttactcacagaccaatgggaaacagagagcaagaaggctccccctgcactgcatccccagcagctagcatgatgcctggcacataagagcagttgtgtccagtaaatatttgctgggtgaatgactcgtgccttgtgcagagcgtctatcagatgggtctgttctggcaactgtctctggaaaatctcaactggcacaatcatggctttgcagagcttcctcttccttctctttctcatgacagtctgccttgtctcatttatggcacagagaaaggtcaatttcaggccagtaaccattgattattttttcccttgtcccaggcggtggttatcatgggtgtggtgctacaaggtgccaacctgtatggttacatcaggtgtaaggtgcgcagcagaaagcatttaaccagcatggctacttcatattttggaaagcagtttttaagacaagtaagtgttttctggatgtgatcagtgactaatgcaattatttctaactttcatagtttaatttttatgaaacgctcctgaacagaagttttaaaggcatatagttgtataaatataatgataaagatgttgtaattgctctttgggggtgttcaagacagtctggaagtgtattgtcagtatcctaaaattattttaaagccaggaaggataaactatcattgataataacttattttttaaaaattacttttaagttcagttgtttttcatcaattatgggagctttaagtgaatgcccttgcagaatgtatgttgtatgttttttttttttttttttgagacagagttttgctctgtcgcccaggctggagtgcagtggtgcaatcttggctcactgcaacctctgccccccgggttcatgtgattctcctgcctcagccttatgagtagctgggattacaggcgcatgccaccacgcccagctaattttttgtgttttcagtagagatgggatttcatcgtgttagccaggatggtctccatctcatgaccttgtgatctgcctacctcggcctcccaaagtgctgggattacaggcgtgagccaccgtgcccagcctgtatgttgtatggttttagggagaacagttgaatcacaagaagaccataacatttgtactcagatgtttttttccccctagaacataaggattttactataataccccaacatcagggttttcagcaggatgagtagtagtcataggtaaataattattggttaaatttcttgggaaaagtgactaggtctttttttttttttttttttttttttcttgagacggagtctcgctctgtcgcccaggctggagtgcagtggcgcgatctcggcttactgcaagctccgcctcccgggttcacgccattcttctgcatcagcctcccgagtagctgggactacaggcgccgccaccacgcctggcttttttgtatttttagtagagacggggtttcaccgtgttagccaggatggtctcgatctcctgacctcatgatccaccctcctcggcctcccaaagtgctgggattacaggtgtaagccacggcgcccagcctagcatgtctactttttaatgtgattgggccattgtatgtaaggtaatgctctgcttagaaatatagaatgttttcctaggcctagtccccaagtccatggtgtgtgaagtgaaataactttgatgttaaggagttttttttttttgtcttttgcagaacactggagatgatcagacttcctgaatagagaaagcttatgtgctttgttacattggggaacaactgaagagattcttgactcaaccttttagagcttagtccatgttgcaacgaggagtgttggctttgtttttccacttaaaaactttatttataaaaaggaaaagtagttttcatattaagtttttatttcctttccagcagttggggctagaaagtatgtgttggcactagaaacattgtcaagatttgttctgtggtgtaggtatgcacattccataggtatgcacacggccatgtaatatcagtatatcccaagttaatgaaagtgttcatttacataggtaatggagacctttgcattttgatccatagaacataggaggatgttcttagtctgtctcaaagctctatatgtttacatattatttctgtagattgttttcaggagaaagttttgcttctatggtaagagtgagcactttggcttatgtataagttagaaataattgttagtttttaatatgcacttcgtggggaaatttcttagacgtatgcaagcaagtgaaaacaattagggccagtggtattaactactttataaaattttatttttgtttgtaagaagtcatctatttaaggcccagttaatataagtggaatcatcatagtttaaggaatacccagagattgctgctgttctatttattttacagaaaggatagctagattgaaagctcttcagtggaccttgagctaatagatcttttaccactaaaagagcattattctcatgtcataatgagaataataatttacatacttggcataataaatgcctaaaagacattttattttctgaatctatttttttcttgctataatggggatattgtaaattatgcatttgtattaatggtatttcttaaagcaatctatgtaactgtaaattaaaccaatctacaaactattgtaggcatctgtaaattctgttgtaggtattataaactttgttgaagtcttaatcagcagattatgttgtgaatatatttgtacattgttaaaatagtttttaagattatttgtttaattgaataagtgtcttattggagtgatagctttgaaggtgcaaaactttatatttgtataaaattctactatttacaaggcatttgacatgtgtaatctcatttaaccctcatgataaatatgtaatactttagatgatataactgaacttcaggttattgagtgactttcccaaggaaaacagattgcaggaatatctgtaggatataaaacatgatatattagtattttttagagaaaatatttgctctaaatgccctttcctttcttaaaaattaataatttgttaagagcttgtttattttacttagctgttctgtctggtgagaattgatactgcactaaagacattttaaaatacaatctgaaagatctaacctaaatctttagggttgagagtctaacaaaggatacattggtgtagttctttaggtaactgtgttatttgaactgcatcctaaaccaagtaacaatgaattttagaatatgcatgtggtaggagctaccctgtattccctaatactcgtttttctccttctacagatttcccacctaattagctagggaatggcatcctggaataaagataaaacttttcctagattttatcgctgtatcttggtgtggccacatcaccaagtttgggccaatggatacacttccaggaagtatccttaaaaggaggaggcatgcccatcccttccccctttttcctgaaaggtagacacaatagcagaaactagagcagccatcttggactatgtgataaaggcttcgttttgtgaatagcagagaaatgaggtagatactgtctgaatcccatcttgtgggtatagtagccctgaactacttgtctgaatttttttttttgaaacagagtttttgctcttgtcacccaggctggagtgcagtggtgtgatctcggctcattgcaacctctgccctctgggttcaagtgattctcctgcctcagcctccctagtagctgggattaccaccctgccactacacctggctaatttttgtatttttagtagagacgggatttcaccacaatggccaggctagtctcgaattcctgaccttaggtgattcgcccgcctcagccacccaaagtacttagattacaggcgtgagccatcgtatctggcgacctgtttgaacttttaataaaagtgaagggaggaactaccttcttcaagtgttaatgttctggcttctctgttgctcatagcctaactggattcttgtcaatacagtgcactttgagcattatccatgattatttccatttgaagtaactttccatattgtactaacaactccagttgttagtacagtattagagatgtaataatttagtaaatacctagttgtcctttatgtagtaattaagtaaatattgtagttgctgccgagttgcactgttcagatgctgttgctacgtaaaactccactcctagaattactggtgaaaagtcattttattatgctcacaaattgtgtgggacaggaatttggatggagcacagtgatggctggggaaggagccagggagtggcagggagcttttcagctactggcctggaggttgacattggctgtcagctgtggcctcagctaggctctcggttggaacacctacactgtgtagtttctccctgtgggcacatttgacttcttcacaacctggcactgggttctaacaatgagccttccaagagagcaagagaagtgcatggcattttaatgattagtcttggaattcacatgatgtgtcttctgtcatacttcattggatgaagcagtaaccaaggtccatccagcttcaatagaatggtacatagagcccagtacttgatgagaggagtgttaagattacattataataagaagtatgtgggatgggagatagtctttagaaaataaaatctgtgacactttaatcatttcattaagactgaagaaattaggagagactgaggataagtggttttccattttttttccctgggtcagccttggatacaggtgaattgactgaatggtgctagtaaaatggaagtaaaatcacatttttgtttttttattttgacatggagtttctctcttgttgcccaggctggagtgcagtgccgtaatcttggctcactgcaacctccacctctcgggttcaagtgattctcctgcctcagcctcccaagtagctgagactacaggtgcccaccaccacgcccggctaattttgtatttttagtagatacagggtttctctgtgttggtcaggctagtcttgaactcccgacctcaggtgatctgcctgtcttggcctcccaaagtgctgggattacaggtgtgagccaccacgcctggccctagtaaaatcacattctaattctacatcccccagagtatgtattctttgacccagacctctaaataggtaagggtgtatgtgtgtgtgtgtgtgtgtgtgtgtgtgtgtgtgtgtagaagtgatggcacattaactccaacatataggtactatgggccttttaaatctatataactcttagagcttattaaagttcctttatgtattatctcatgtgattctccccaagagggaagaatgaccattatgtaccatgtaacctcatgttacaggtaggtaactaatactgagagaagtaaaataatttattgaaggttgcatgtagtagagatagtaatgctcactaaacattccatttgttctacatttctcagcttccttaattaatttgaggccatgtggttaacaatggccaatgaaatgtgagtgaaagtgaatagagatgctaggtgcctgaagagcataggacagttttagacaacaaagaattgtcctgtatctcatgacttctttgaacctcgctgaataattatgtacatagaaatcctgtttataatgagaaaggaagagcaacccctacagctgtcagctggaagctgatttagccctaatggctaggctattatattctgttgaatataaacaatgttatataacaccaacatctgacaagtccactctgagtgtggtggaggaagacaaaaattaagacactccataggcatgttggaacttagcaagattctgtgtaaatcatagagcgaccaaacattcttgtctcttggcttatatgtgtgatatttgctccattacccattagatcactctgttccttcttcctcctagattaaaaatttcaatatttacactcatttagaatttcccttgctttctgaaagcacttaatccagagtaaaaccatgattcatggagcccttcttgaaatcacccaacacaaccccaaatcctttaaaaagcccttcccagcaccctcatactgaggcaccccatggttccccatggtgtgtgatctctcttgtgtaaaagtgtgctgataaacccaactcgattcaactgcagatctgttcctcatgatctctgacgggtggacattgacaataattttttgagcttagattataactccattttatatttttgttgtagatctgcagtacttgatttgctcaaaaatgcaattaccagttaagtgagggaaggtcgtagtctttgttcagtacgtaaccaagagttttctatcattttaaaaactgtcactagtggcaacattgctcatggcatttgagttccaggtcaaaactactgcagtagtctgcatttgtagtgggcacattaatggtaattatatgtacatgtgcaagcatctaatgattgtgtcatcaggagttttggccatctccagtttgaattacacattaccgtaagttgcttccttttatttgtctgttacattacagttagatattaaagatacctttaatcatgatagatgatttaaaaatatgcctcacgtaagttatattgtttgtgttttagaataataaaacatgtttaaaaatatttctgataaaaagtggctgtgggcctgaaggggtgaaaaccattagtctacagtcattgatgaacagtctgtcccttaggccctcttagttggagctgaagagtgtatagatacgaacttgaactctggtgttctaatattctgtgttgcttactgaaggtagatgccatgtgctttggaaaccagcatggacattctatgaaatttgagaagagaagcagttttctcatttagatggtctatcatgggtggtaatatctagtgttctaagtgaatgtagtagatgctgcttatattaatttaagagaaatcctatatatcccattaaaaaaaatcgtagagaaacatttccagaatggtggagtatggatctttgaatatctgattctgcataaaatcaatgaggacactggcaggaatgatcaaaataaacttttttaaactctggaaattaaccaaacgattgcaacaacccaaagaaaatgtatttgagaaaaaagctgactttccgtatgatcaataaggtttgtggtgttttaacttgtcctgtccccattttcttctcagctccacagtagccttgaaaatcagcaaccttgagaccacagtagctgtgaaaaccagtagcctagaaaccactgaaggaatttagagtcccccccaagataggtttggagttatccaagaagccccatccccagagatttgtcactccttgacctgtctggcagctccctggaatagtcccaatcacagggcttgtcttcatttaacccaactcaggtcactcaatgaggaaactatcctcaggttgtttgttataaacaattggtggcaattatttaaacagcacagttgcctgacatggctatactagttgggacaaatgagactggccagaaaacttgaaaaaaggggagtgcgatgtctacagaggctttgaaaagtgtcaaaatattcttgggagctagaaagtcaggtaaaggtgagagacttatgcttcaaccacttaaggaaatccctgtctaatcatatgctcaagactaaagtaaccaagcagagattttggtgactgcaacatgacaaagaacacagactaaacagaattagtcgaggaaaggtactagacataccaccattgcaataaaaataacaaatagtaacaaactctacaaagatggggggtgtgggacaaatctgatttgcagagttgccaccttatattatttaaattttccagttttcaacaacaacaaaagacgtgaagaaacagcaattacagccgcctatatatgggggaaaaaacttagaaaacagaaaccatccctgagaaaacccagacattagatctattaaacaaaaagtttgtcaacctttaaatatgctttaaaaactaaagtaaaccatggacaaagaacacgagaaaggaaaataatgtataaacaaagtgaaagtatcagtaaatagaaaacatgaaaaattctggagctgaaaaatttcttagagggctttacagatttaaacaggcagaagaatcagcaaatttgaaaataggacaaatgtaattatccagtccgaggaacagaaagaaaaaagaatgaagagtgaacagagcttgagggatctgtggcatgctatcaagttaccaacatatgcattaaaggagttccagaaaacgaaaagaaaaaggcagaaataatatttgaggaaataatggctgagacttcccaaattcaatgaaatacatgagctacacattcaagaagatcaacaaattataactaggataaactcagagatctattactaaacacattacaatcaagctgtcaaaagccagagacaaagacaatcattaaagtagcaggagaaaaacaacttatcacatacaagggatcctgtgtaagattaaatgcctaccactcatcagaaactacagaggtcagaaggctgtagaatgacatattcaaagtgctaaaagaaaaaacttaacagagaattttagatccagcaaaactatccttcaaaactataagaaaggatgagcatggtggctcacacctgtaatcccagtactttaggaggctgaggcaggaggattgcttgagcccaggaatttgagaccagcctgggcaacatggcaaaaagccatctctataaaaaatacaacaaacagctgggtgtgggggcatgtgcctgtggtcccagctactcaggaggctgaggcaggaggatcacttgagtctggcaggttgaggccttgattgtgtcactgcacccctacttgggtgacacagtgagacaccctctcaaaaaaaaaaaaaagtggaaattaaaacatacccagataaaaactaagaattcactgctagcagacctgccttacaagaaatgctaaaagacatccttcagactgaaatgaaaggacactagacaataactccaatccacatgaggaaataaaaagcatcattaaaggtaactacataggtaaatacgaaatatagtataaatgtatttttgtttgtaattcttttcctgtctgacctaaaagacaactacataaagcaatacttatgaaataatgttgatagggttataacttataaaagatgcaatttgtatgatgataatagcacaaaggaggaggaagggaatagagctataccaaagtttttgagtattattgaaattaggttggcattaatctgaacctactttatgttaagatattaatcatagtccctagggcaacctctaagaaaaaaaactcaaaaaatacaataagaggaacaagaaggaaatcaaaatgatatactagaaaatacctatttaatacaaaaggcagtagtggagaaattaaatcaaaagacataagatgcataaaaggaaaagagcagatatcccacaaatgactcccaccttatcagtaattatattagaagaaaaccagttaaataattcagtcaaaagacagatttgcggctgggcacagtggctcacgcctgtaatcccagcactttgggaggtctaggtgagcggatcacttgaggtcaggagttcaagaccagactggccaacacggtgaaaccccatctctgctaaaaatgcaaaaattagctgggtgtggtggtgggcacctgtaatcccaactactctggaggctgagggatgagaatcacttgaacccaggaggcggaggttgcagtgagctgagatcacaccactggactccagcgtgggtgacagcgagactccatctcaaaaaaaacccaaaaaacagatcggcaaaaaacatgatccaactatatgttgtctacaagaggcacactttagattcaaagacacaggtagaaagtgaaagtatagaaacagatataccatgcaagcagcaatcaaaagatagctggagtgactatgccaatgtcaaacagtagattttaaggcaaaaactgtttcaagggacaaagaaggacatcacacattggtaaaaggaccaattcatcagaaaaacataacacttaaaaacaaatatgcacttaaaaaatcccacacatgaaacaaaagctgacaaaactctccataatgaataattattaacaactgaataattattaacaattaatttacttttttttttttgagacagagtctcactctatcacccaggctggagtgcagtggtgctgactcggctcactgcgacccccccgctcccaggttcaagcaattctcctgcctcagcctcccgagtagctgggattacaggcctgcaccaccatgccaggctaatttttgtatttttagtagagataggatttcaccatgttggccaggctggtctcaaactcctgacctcaagtgatctgcctcccttggcttcccaaagtgctgggattacaggcgtgagcctctgagcctggcataacaatttactcttaataattattaataactaaatgagataatccacataaaagagtaagcttagtcccaggtacacggtaagcacttgataatgataactcttatttagaaagaaaaactgagttgctttgctagttaaaggtaaagaagtcagaaaatctaacaatagtggctggagacatcaacacttcatttataataatgcatagaagtaggcagatgattaggaaaaagaggattcaaaagcactataaacaaactaaatctgccaggcacggtggctgatttctgtaatcccagcactttgggaggctgaggcgggcaggtcacttgaggtcaggagttcgagaccagcctggccaacatggtgaaaccccgtctctgctaaaaatacaaaaattagctgggtgtggtggcgcatgcctgtaatcccagctacttgggaggctgaggcaggatgaactcgggaggtggaagcttcggtgagccaagatcacgccacggcactccagcctgggtgacaaatgagactccatctcaaacaaacaaaaaaacccaacagacatctgtagagactctgtccaacaacagcagaatacacattctactcaaatgaacatggaacattttccacgatagactatatgttaggccataaaacaggcttcaataaatttaaaataatcgaagtcatacaaagtataatctttggtcaaaatggaattaaattagaaatgaacaacacaagggaatttgggaaattcacaaagatgtgaaaattaaacaacatactgctaaataaccagtgggtcaaagaagaaatcacaagggaaattagaaaatactttgagattaatgaaaatgaaaacacaacataccaacacttatgggatgcagctataacagtgtttatagagaaatccataactgtaaacacttatttttttttaaacaagacatctcaaatcaagtctcacctttcatcttaagaaactagaagatgaccatagtaaatcaaagtaagcagaaggaaggaaataatagattagaaaggaaagaaaaaacataaagacttgaaaaacagtagagaaaacaacaaaactagaagttggttctttgaaaggattagcaaaattgacaaacctggaatcagattgaaagaaaagataccactactgtttactgaaaaagcaatccttactgaatgcttttgtaaagcgattggttatcccaatagaatatacatcactttacacctattttttgtgtgaacattctgttatgtaagcattcgaacattgtttttctccaaaaagtgctttccacgaattgtttcatcctcgtgacattcttagaatgcagaagctgttgtatttagtaaactgtaatcattaagaacttgtatttgattcaggcagatctgagttgtggatccagttcaatatccttttttagattttgagaaagtcacttatcccatttttacagatgaagcagcaggctgagagtcataagcacaagtaaatacttaccctcgaggtgggaggagcttgtgaggattaaatgagataactcatgtaaaatgttcagtatagtcccaagcccacagtaagccctcgataatggtaacttgctcagatggaaaaccgaattgctaagctaaaggtgcagcagtcaggggagctaacccctagttaagtggctcctcttttaatttagattctcatctagtatatggcatggataatccaaatgcagcaaaacagtcaattataggaaagaatgctgatttcattttattttttattttgtttagaacaagttaaagatagaagaaaaactttaaacaaaataaatgtaacggagcaaagaatgattcatgggaattgggctttgctctgaaacatgggcagtgagtatttacaggcagaaaaaggctgaagaatgcagaaacaaagaacacaaagtggattggttttttcaaagttactttccttgtgaaggttaaagtagggggacttccttatcaggcaggctaaaactggctgttcggagatgtggctattatctccctctcactcctgatttcttggaaggtcagataacaatgtagttttggcttggtggcctggaacttcaccgtgagtaactccattttggtttggtctactggggcctagtgcaggaacttacttcaaaccaacgacctcctataaatttttttaacagagatcataagtttatgagccagtaacttactatagcattcatttctaatttatagttaaaacacatcctgttatttatttttttcacataatcgttgaaattcaacacagctacgaatgagtcttaatgttttttaaacatttcttctaggatgttgcctttctccccaagccccagttccctcttgcttgtagcttgcacttggtcctctagatggcaatatactaacatatgatgtaaatgaaaccaacgcatcctggagcagccaatttacttggtttagtaagaaatgatggttttcctacaagtggtgagttaggactaaatccatgcatcttattgtgaaattagtcaaaatcagtgccagggaatgaatagatgctgaataaataagtacaatataatacccacaatgtacagagatcaagcaagacaggtaccgtagacacagtcagacataagaagaactatgagtgctatgtgtctaccttcctgatcttggcaaaccctgccatttaacaagtgaggaaactgaggattgggggatcagtagctttcccggggtcatataactagagagaggtgaagccaggacttgtcaatggtgaggcttcgatgatgagcttgaatttaagatatgtcagatttgaagccaatggagcatatcaaattagcaaagtgcagtggaaacctggaactcaacctcaggattaggccaaaggtatacatttaagaggcatctctgtagagcagagtcgaagctgtaacaatgtaggagtggtctacagcaactgtgtctgttaaagagctgataactgaagtgtaattcccaaagaccaaggtgatatggcagcgggtaaagggcatacgcagtgcagacaaacatgagtttaaatcctggcttcatatttacttgctgtgttggtcatgggcatttaacctcttaaatatcgtgagatacttaatctctttgactctttgcaataaccctgtgagggagatactacctccattttacagatgaaaactgagggttagagaatgtaggagttgacccaaggtcagggtgcatctagtacatgatggatccaaggttcctatctggacagtctgccttaggcttacagtgctaagcaccacatgcagtttccccaatcatacaccttaggacaccacctttgtatgtgggtctcgtgccagagatgaacgtgggcgcatgcacatgcgcgcatgcgcgcgcgcgcacgcacacacacacacacacacacacacacacacacacacggagagagatttatttcaaggagttggcttacacagttgtgggaactgacaaatccaaattctgtcgggcaggccagcaggctggaactctcaagcaggagctgatgttgcaatcttgaggtcaactttctacttcctcaggaaaatcttagttttgttcataaggcctttaactgactggctgagacattcccacacagtaaaagagcaacctgttttactcaatgttaacagattgtagatgttagccacatctataaaatagcttcaaagcaaacaacacctacattagtgtttgattaaataactcagtactagccaagctgacacaaaaaattaaccatcacacgcttccagctgtctgtaaacgctatgacagcaggaagcctatctttgtcattcgccttcccattgtcagtgcatgacccagtgccgggcacctaatggcactcaataaacatttattgggcatgtgcccgccttttaacagtgtaggtgaaagccattgtatacatgctgttttcaactgctgacctgtgctagctacagattttcagtgtgttcaactcacacattactttctctggggctccctggatggagcagtggaaggactgatctcaaagcaggagacagagacacctccttcctggagatctggcttggccaactgggtagttttccttttcagaagatgaagcaactgatggtcattgccagagccaggaggaggagggctgccactgccaagagccgagtggtggtcctggtaggacactgctcatgcactgtgtctgttcttaggtttcagctggcatctgtttccagctcttggtgctatttgcaaccttgtatcttaggatgaaggcataaaggttttcaagcagcaaaaccttccagggttagataagagtgtttcactgtggatctgtgagcacctatagccactgtgtgcatccctctgggaccccagcaactgcttctgagaaaacagagggatggagaagaggacgccacccagatggtggaaacatctatcaaaagttaggatgtcctctagaaagcctctttgggtgtctgatttcatatctccttcctcatcagagaatggcgtcgcctcctatttgatgagaatttaaacacatctagaacatgtgcttaccttttcctatctcctgtctctgggatcacatcatactgcctccaagaatcctgtccttaacccccttccttagaatttacagcatagcctggaaacaaccaagcattcatctttattctaaagtacctagaacagagctggatctgtgacacatattcaaaggctgtttaatcaaacaggaaaaactcatatttggagtagggagtagggggaggcaaaatggtactctcaatgaattataatattttaaaatttgtctaatagagagtataaaacaaaccagagaagcataaaggaaggtcatgctaattttcatgaggtattttctaactccaggaacaaaatggtgaaagggcattctaagtcaaaggaatttatcatgtaaagacgggagtaacacacacacacacacacacacacacacaccactctgctacaaccacaagaaacactttgttgttcttcaaatgcaccaagctctcttcagcagtgttttgtagtgcgtataggacatctttgaaatattctggatatttaatctttgtcttcttggcatgttaaaaatatcttctggcggctgggcacggtggctcacgcctgtaatcccagcactttgggaggccgaggcgggcggatcacgaggtcaggagatcaagaccatcctggctaacacggtgaaaccctgtctctactaaaaatacaaaaaattagccgggcgtggtggcgggcgcctgtagtcccagctacttgggagactgaggcaggagaatggcgtgaacctgggaggcggagctggcagtgagccgagattgcgccactgcactctagcctgggcgacagagtgagactctgtctcaaaaaaaaaaaaaagaaaaaaaaaatcttccagccaggtgcagtgctcatgcctgtaatctcagcactttgggaggccaaagggggtggatcacctgaggtcaagagttcaagactagcctggccaacatggtgaaacccatctctacaaaaatacaaaaattagctgggcatggtggtgggtgcctttaatcccagctacttgggaggctgaggcgggagaatcgcttgaacctgggaggcagaggttgcagtgagccgagatcgtgccactgcactccagcctggcaacagagcgagactctgtctcaaaaagaaaaaaaaaagaaaaaaaaggcctggcggggtggctcatgcctgtaatcctagaactttgggaggccgaggtgggtggactgcctgagctcaggcattcgagaccagtctgggcaacacagtgaaaccccatctctattaaaatacaaaaaattagccgggcggcatgcacctgtagtcctagctactcgggaggccgaggcaggagaatcacttgaacccgggaggcagaagttgcagtgagccgagatcgcgccactgtactccagcctgggtgacagagcgagactacgtctccaaaaaaaaaaaaaaattctgctctataacttcacgtttaacattgtttagggaggtttttgtttgtttggtttgttctttttagagggaatctcgctctggtggtgcacaggtgtgcaccaccatgcctggataatttgtgtatatttgtagagatggggtttcaccatgttggtcaggctggtctggaactcctgacctccggtgatccgcccaccttggcctcccattgtgctgggattacaggtgtgagccacaatgcttggccaggagtgttttgacttttataagttttttaaaaaatgtagccaaacttaccaacttttatgacttctcttttcaatattcattgaaaaccctctttatcaatgtaataatgatatgctacattttcttttaaagttataaaatgctgcttttcatatttagcttttaaaattatctagaatttatcttggcatatagactgaagtagggatctcattttatctttccccatgtagacagccaattgtatcagcaccctgtattgaataatccagattttcctcactgatttgtgatgccattctgtcaaataccaagttcctggtgtgaataggtctattttttccttatttatttataggggtactttgtgttttctgaatgctaattctttgccactgatatatattgtgaatgtcttatctcactttgaatttctcatgaatagcagctcaattaaaattatcaatcttttatagtttctgttttatgcttcatatttgtgaatttccttcttaccctaagaacataaagatattttcctatatagtctcttaaatgtttcataagttatgtctttaagcctcctcaaattgatttttttggtatggtgtgaggtagaatctgtagtaatttgtaatatttgctcagaattctttctttccttcctgcctgtgccatgattcattttgggtagaatgtactccacttcccccctgtctttgagcttaaccacgtgacttgttttggtgattagaatgtgagcagatataatgtatgtcccacccaataagaaactttaaatgtgtggtttgatttactctcgtgtattccttacctgcaacatgagaagtgcatgccccgggtggccacactccttcagcttgggtcagagaatgagagacatgtggagtagacctgatctgacctctgtgtgacttatagacctctgtgtgacaaatatatgtttgtcattatatgctactgagatttgggaagttgtttgttacacagcataattgcagcaacatggctaacacagaatcacatttctttttatttcccatgtggctaaccaattactgaaatatctgtccttttcacattaatctccaataccaactccatcataaactaagcttctctatatatgtggttctctttcatgcctctcttttcagttacatttctctatttgaatatccctataccaatacccactaacttaattagtagagattataataattttttttttttttgagatggagtctcgctctgtcgcccaggctggagtgcagtggcataatctcagctcactgcaagctccgcctcctgggctcatgccattctcctgcctcagcctcccaagtagctggaactacaggcgcccaccaccactcctggccaatttttttgtatgtttagtagagatggggtttcaccatgttagcaggatggtcctgatctcctgaccttgtgatctgcctgcctcgacctcccaaagtgctgggattacaggtgtaagctaccgcacctggccagattataataattttataatcaacttgttaagtaccaaaaaagctctgctagaattttgatcataactccattgaaaccgtgtatcaagtggggggaattctcatctttgcaatattgaatcttctgatccatgaacattgtatgtctcttaagtccttgatttctttaagtaaagtttttataattttctctatagaggtcttttctatttgtggttagctttatttttgggtactttacattttctgttgctatcattagtagtattttatgccatcacatttttttaaaggttcattttaaatgtatatactttaggatttttgtgtagatattttgggatttttatctagacaaacatgcaaactgcaaatgatgacagattttttttccttcatttccaatcttcatatttttttatgcgttactgctttcactaggaactccagtataattttgtaaggacatggtggtatcaagcacccttgcttgcccacaatattaaggggaacatttataatatcacagttaacggtaaaatgttgaaagctttgtttgaacatgcgtggatgtccactttcagccataatgtgataacaagaaccagacttatcctcccactgtgagtaactagaaagtggacaagatacataaaataacttatttcaggaagtacatgattgtgatccctgggaaaatggacataagtgaaaagaaccctataattgccttggctttctacctggaggcaatttctgacaataggataagggaggaggaatctaaatagagcctgaaatcctctctgagttgagaagatcaaagatgacccaaaaaagggaacccagaggacgttaggtgatctgaaaccatgtcatctggaaaatagttagaagtcctgggctgtttaactggcagtagggaagactgaggggcaatatgaaaactgtctttagagattagaaaaactgtcatgttgaacaggggttgtttgtgttctgtatggccctgaaagacagagtttaggacagctggatggaaatgagagaaagaggattttggtgaaatccaaggaaacactttctagcaatcatggttgatcaggctggagtgggcagccttcctcagctggcggatgaaggcactgagcaagcatgctgggttgttgctgaaggagcttctgtagtggcaagtgaccaagctaaatggcatccagggtcccttttactcttaaagtttttcatagtttggtttgcatagcttggcctccataaaaggcagctgttaccaaatgacagtgctttttgtttgtttgtttgagacagagtctcgctgtcgcccaggctggagtgcagtggtgcgatcttggctcactgcaggctccaccccctggggttcatgccattctcttgcctcagcctccagagtagctgggactacaggcgcccgccacccagcccggctaattttttgtatttttagtagagacggggtttcaccgtgttagccaggatggtctcgatctcctgacctcgtgatccgtccgcctcggcctcccaaagtgctgggattacagacgtgagccactgtgcccggccaagaaaaagatatttttgagttagtaagttgtatgttttctttatagtcacattataatgaattagacttgttatgaaattggaacttctatttaatttttaaaataaatgacttatgtttagtaaatgaatatcaatcacaattgacccttaacaatgtggaatttagggatgcttgattccctctgcagtcaaacatctgtgtataaattttgactcccccaagaacgtaactactaatagctaactgttgaccagcagccttattgataacataaacagtcaattaagatatgtttggtatggtatatgtattaatatgctgtattcttacaataaaggaagctagggaaataaactgttaagaaaatcataaggcagaaaaaatacgcttactgttcattaaatgcaagtggatcattctataactcttcatcatagtcttcaagttgagcaggctaaggagaaggaggaagaggaagattagtcttcgctgtctcaggtggtagaggtgggagaaaatctgctcataagtagacccctgcagttcaaatccgtgttgttcaaaggctaactatattacatagtgatttgtgtcactaaaaaaaagaaattagtttcaaaactggaaactcagcaatacctttctggcaccataaacaaatggcaataagaaccgtgaaatggccaggtgtgctgcccagacctgtagtcccagcaagttgggaggcctaggtgggaggatcgcttgtgtccagaagttccagaccagcctgggtgacagagtgagaccacatctctacaaaaacaaatacaaaattagctgggtgttttggtgcacacctgtaatcccagctacttgggagactgagatgggaggatcgcttgagcctgggagtcaaggctatagtgagctgtgatcatgatcacaacctggatgacagagtgagaccctgtctcagaaaaaaacaaaaacaaaaacacaaacaaaaccctgccaaacatacccaatgtgcactaatactaatgggaaattattttttaaagagaccttctgagtgcagaagtcagaaaagcaattccttgttgagaagaacaggtcatgttacatacttataaaccaacaaggtgtcactattattgactttcccccaatttgaaatcgaatgaggtatatttacttcattagaacaagatgtgtttttctacctgctggttaattgctatgttaacagtaattttgttagaacaagatatgctgttaccattagccaaaagattatcataataaatattcaaatagcccaactctaggctcaacaaattataatggaagtataaaaatgtttcacaataacaaaaaatgcttctgtgcttccaagatgtgatgcctaatgcattggacaatctgaactgtaagaggacacctttaatttagtacatattaatcaaagaacttctctaagttaggttttgcacgttatgggagacaaacatgaaatagacatagttttggtctttgaggtgctcataatagaatagagctttctctatttaatttctgtgttttttccaacagaattttcaaggaaatcatttattcatttgtccacttaacaaataattatcaaatgtcttttagtactaagctttttttttctaatgttacagaatacagacatttaaaaatactgttggggccagcacagtggtgcatgcctgtaatctcaccactttgggaggctgagatgggaggatcacttgagcccagaagttcgagaccagcccgggcaacatgacaagacctcatctctactaaattttttaaaaaacaataaaacattagctgggcatggtgccaggtgcctgtacttccagctacttgggaggctgaggtgggaggattgcttgagcctgggtgtttgaggctacagtgagctatgatcatgccactgcactcgtgtctgggtaacagagtgagaccctgtctcaaaaaagaaaaaaaacaaaccaacaaaacccaggagcttgttattatcattgtcactttaattatttgatgaattatttattcagtgcctactactgtgttagatgccctctggaaccgtatagtgatcatttattatgttaaatatgtgccagacactttatgtggtgaggaatgaaagctgtaaaaaagtgggtaagatttaaggtaagcatgaagagtgagtagaacttttctaggtaaagaggcagaaggatgatgtgggcagaagattgtgtgtgtggcagaaggagcagcgagtgcaaaagtaagatgcttgagtgaactttgcagggtttatgagcagttcagttttgccagtgcaaaacatatgagatgtgaatggttgggaatgaagtgaatacctaaggcaagctcatgacagacttttttttgagacaaagtctcactctgtcacccaggctggagtgcagtggcgttcgcttggctcactgcaacctccgcctcccgagttcaagtgattctcgtgcctcagcctcccaggtagctgggattacaggcgcgagccaccatgcccagctgatttttgtattttcagtagagacagggtttcggcatgtttgacgggctggtctcaaactcctgacctcaagcgatccacccacctcggcctctcaagtgctgggattacagacgtgagccaccactccctgcccagactttttaatactatagaaatgagtagatctcgggccgggcatggtggcttatgcctataatcccagcattttgggaggccaaggagggcagatcacaaggtcaggagatcgagaccatcctggccaacatggtgaaacctgtctctactaagaatacacatgaaaaattagccagacgtggtggagcatgcctatggtcccagctactcaggaggctgaggcaggagaatcacttgaaccttggaggcagaggctgcagtgagccaagatcgcaccactgcactccagcctgggtgacagagcaagactctgtctcaaaaaaaaaaaaaaaagaaaaaaagaaaaaagaaagaaatgagtagaacttttcctgtaggccatgggaaatttaccaggtggaatgctttgggctgtaaatactagatgacctaactaacagtggctaaaacagtagggaccagagttgttttgatggttcagtgataacacggtgttttgttcatgtctgttttcatggctgactaattagcaacagctccaaacatcgtggtctcaccgacaatatctttacatgtttcttttagttagggagaagactcagaagggtgcagttgacttcctgtaacattttattggctgggtcctaccacatgctcattcctaaaccaggcactggggaagcaaatgtaattactatgatgagcttagaataatcatttcttcttttggagtggggagggctattggcatgataaatatccaaatagatgcgtgtttctctattgagaaacagggaatcgctattgggtagggagacagcaatgtttactgtagggactcattggagtggggagtcacatgattagatttgagtattagggcaatctggttatggtataaaacagggattggcaagcattttctgtacagggctttttcatgtggtctgtcattcctactcaaccctaccattgaagtatgaaaacagtcataaaaaggcaagcaaatatacatgactgagctccggtaaaactttatttacaaaactataaggcagactggatttgctccatggcctgtagtttgctgacccctcatatggagagcagctggaagataaccacataaagagacagggaaacaaaagaaacatttgcatttatcagagctatagtttccttgtgctgtcctcagactagtgtcagtctgttgtgaggttctcacccatccatggtgaaatcagtaaggttaaggagctcagttattcatttaaaaatgtcggtctttttcttggcatgatgcctttttcatttattttacttaaacttttttttcatttaagaaataacattaatagttgttttttccctataaaagccagtacttaagagcccatgtttaactaggaaatataaacataaaataaacgtgtcacagtggaaatataaagcagatgcagaaaagaggtacagttaatatgatttagtgattgttgaatgtaaaaagataggggatagggagaaatctcagatgattctcaggtttctggcttgtgccctaacatttaacctggacacgagggagtaggcagttttcaggtgtatagaggagagcagcaggtcagcagtcacgactaacagttttctctgcattgctgagtttactgaaatgtccatgtgggatattttcagtaggtaattggaaaaatttttatggctggagatggaactctgaggttggagttgcagacttggaataactgaggcaaagttgtagatctgagtgagcttgtccatgatgggaaaggtatagaatgagcagagggccagtgacagaaccctgggaatatcagcatttcccagaggaattaggaaagaagcctgagccgcggctaaagaaaaagaggagaggaatcataaagtgatgttgcaaaaatttacaaaggtgagaatttcaaggagggagtatcaattctaaccagtaagattactaaaaagtaaagtgagttaaccttttaaaagccttcagtggcactgtcttctaaagaacaatcatagagttgtggggttcgctgtttatgtgatcagtacttctgatgttcaaatggggaagaatacacctaccaagatcctacctaacttttgtaactgcagcagctccctgtacaggatcagggaaaatggtcaagactggtgagttaatgtaccaccattttcctagaattgtctaaacctaaggtcatatgtgaggaaaagtgtagtctttcttacctgcttttttgtggaaatgcttgtttggtactcaagtccttgataggctcttctgaattcccaaacaaacatctaacagcaacaactggaagccaccaccagatgcacgtatatatcgttcctctgacatggaatcataatacagccatgttgtgacacaatttcaggttttgattagaaatagtttacaggccagcagtttagacaaactgacattttaaaaatattttattgcaggaaactaatataatgtgctggagaaaaatataaagtgaaatgctgaatatagcagttctcagtacttggggttttggtgacatcaggagaaaagtcagtgcctgactccttttgttagtgcagttcccttttcatttaccctcttgtgatatttctgctcttactgcttccttttgaattccattcctaaagaaaatactattagaacacatttcaaatgcacttctttatatctgcaccacaatgacacaatgatgatggtctgccaagattttaagtgtcttctgggttgtcaaatacaaattgttttatctgacatagtttaaatgtgaagtgcttttgtggtattacatttcttcagaaattggtaatctgtgatttaactagaatatgtggtcaattggattaccacacttttaaccatctatacataagatgtctcttctcccggccagataagttaaaagtcctgttgatccttactgatcagttccactatttgcagggcttttttggacttttgttgttgttgttgttgagacggagtctcgctcttccacccaggcgggactgcagtggcgctatctcggctcactgcaagctccgcctcccgggttcacgccattctcctgcctcagcctcctgagtagctgggactacaggtgcccgccaccgcgcctggctaaatttttgtatttttagtagggacgaggtttcaccgtgttagccaggatggtctcgatctcctgacctcgtgatccacccgcctcggcctcccagagtgctgggattacaggcgtgagccgccgcgcccggcctggactttttttttgaacgggtgtgattatagcacactgcagctttagttcctagcctcaagcaattgttctgcctcagcctcctgagtaggtggaacaacagatgtgtgctactgcacctggcctgctgcacaattattataaaaatgaattaaatcctacctagtgggagaaaattgactgtgatcttataattttttgttccagaaacttttatactgtagaatatattgtcagtcattaagattttctatttttaattgagttaaaataggattgttgctttttaaaattactttctgacattgtttcatgcatttttaatgcctttagtctagtggatatagaagtacaggaatctccaaggcaaatgtcaaaaaataaaaaataagcagattagggaaaggtattctgtgaaattaccttctgattgtagtcacgtgtaacacatcaacttaaacaataaaaaattgtttaatgcaatcgtatcaggggttcccaagacccccttcactgaggtttggtaattcactgagaaggactcacaggactcagcagatagtcatacttggggctttgatttattacatttaatacagcaaaaagacacaaagcaacattcgagaaaggaaaaggtgcatgtgtcaaagtctggaggaagccaggcacaagctacaggagtcgtcatctgtgtagctagcaggatatgcttaattcccccagcctcaaattttgacgacacatgtgcaatgttgtctaccttaccagagtttcattagaggctcagcacccatgttttcgatggaggctagtcacataggccacctctcctctccctcacatgtaacaaaactctagactcccaggaggaaattaattgttcatagtaaaccacatttgcacaaacactttaggcacagtgagccactcccttcttctaagttagggaatgctgggaaccctcccaaattcaaggtaccaaacaccagccaaggactagccttgcaagcaagcctttctaaggatgggtgtctcatgcctgctatatgaaatctttgctgcccagcagctacgcccctgagtaaattgttggtgttatcttaaaattttatataatataatagcaaataatatgatagaccataacatggtactggtttcagttgcatcattcatattaaatagcaaggctgcttacagttttgacatttggtgaatacttaacaggtattggtacataagttactatggcaatattaagtaattataatctgtccttcttatctgattaacctttcagtaaaattgtgggataaagtaggcataataagttctgatttaaaattagaataaaaattgtctttcattttattttcatggatggaccagttttgattcatattgtactaaatccctgtttacagttatgaaataagatcagatattcaatcatttttgtgaatttttttgcctaagtatacgattaaaattaattgctttatgtgtttttatatgctttaatttgggagatagtacttatattctgttaccttgatctttagtgatttgcaattttcaaggtgactctgtctttttataatttagggtaatagcaagttcagtgagtatgtgctttaaaattaataatattattttctgagcagttttagattcacagcaaaattgagaaggtacagagattttccatattccccatgacccctgacatatgaatagcctccctcattatcagtaccccccatcagagttcatcagagttacagttgaggaatctaccttgacagacacatcacccccaaggtccacagtctacgttagggttcactcttggtgttgtacattctatggtgttggacaaatgtgtgatggcatgtatatacccttgtagtatcacagacaaaatagtttcactgccctaaatatcctctgtcctccactgtttcgtctcttcctctccactggtttctggcaaccattggtctttttggtgtctcagtagttttgctttttccagactagtcatatagttggaataaaacagtggcggatatctttttgaatatttaaacaataaagttccatggtaatttgattctgtcattttagatgttctttgtccttgcgtttgttttcctcatgttgtgttcatcagaacaggatctgatggcatatgatttgacgtgctgagaaagcgtgatttctgtagacgtttgccacgtaacggggagggtggggaaaaatggcatcatgcagtattccacagcactaactggaccatcgtgctctaggagatgggtccagatagagtctagcgatgggacgggataatctcaagagctggactttataaaactggaatcacaaagtcttgcatacttaccttgcacttaaaaagaagatcaggcagtgaacactacaggtgaataaatatgttcctctctggttctcttccttttagggatgagcttgaaaacagtctatattattagaatatggctcatctacaactaaatgctctgtcataggaaatgccagtgtttttctttacaataagtgaaaaataattttgttttcaccagagagagtaacaactgttggcacattctggcagcttgagtgagctgatagttctgttcatatatatttttcataccaggtagtactccctggcaacctgccaccactgtggccgtgtttcttcttaagcttctcactgaatgaatggtgtggctcagagtgaataagctctttaagggagtgatctttccagtggttctgtccataggaggtaaaatgggaggtgaatttgagccttgtttgtgctagggaaaatagctagaactcagtaaacattgccagcatctgccccagaagaggattagtgagagtgagtacattgatctcccttgagctcttctccactggcagctgaaaagtctttgcaaaggtccttgtccctggtctcttccctatgttttgccacataacacagcacagcacccatagacctacacaacaaaatgtacagtttttcccccttatccatgggggttatgttccaagacccccagtgaatgcctggaactgtggatagtactgaaccctagataggcagtgtcaggatagaaggaagaggataagagtaaaagggggaataaagaatgtggaaggcagagagtacagagagtaaatgaagggaaaagaagcaagtggatatgatggagggtggtaaaatgagataatacttcaaaagaagagtggggtattagaaaggtggaaagaatataaggtgaacgtgcagcaccaaaacttatcagataagacaaactttacttgccaatatgttagttgtgctttaagtttaattatttcatcatagtgtggctatactgatgattttaagccagtcagatattctggtcagcaaatcatgtgtgtgtgtgttttgattatcaaaaacgaagaaagcaataattacccttaataactatatggtggacacagtcttttaaaacattgattctgaaactttttggcctggggttcattttatatgattaaatattattgcctagaggtaaccaacaccctgaattaagaatttattatgtccattcccttttaaaacattttattacatatgtgtatggtcataaataatatgtagaatttgttttcatgtcctaaaattgtatataaattgttttacactctacatattttgcaactttcttttgtctggtcacattacatttttgaggtcagtccttattgacacaggaagctctggttttctatcaaatgactggatctcaaagtctcttcataatgataaataaataattaaaataaagaaaaattattgcaaattccaaagagcttttatttaagtcggttgtgtcttttgatatttactattttagaaataaaaactaaaatattttaaaaacaagcatgcggccgggcgtggtggctcacgcctgtaatgccagcactttgggaggccgaggcgggcggatcacgaggtcaggagatcgagaccatcctggctaacacggtgaaaccccgtctctactaaaaatacaaaaaattagctgggcatggtggagggcgccggtagtcccagctactggggaggctgaggcagagaatggtgtgaacccggcaggcggagcttgcagtgagccgagatcgcgccactgcactccaggctgggtgacagagagagactccatctgaaaaaacaaacaaacgaacaaaaaaaaacaagcacgcacagccatacattccaatagcctttagaactatgacccattcaccattagagctatgatgttatgacacaccatgtctatgaaaagctccactgtacacgtgaaacagaatgagagtgaaaatggcaaataacattttgtgttatttgacgtcttggcccctcatctggatcttgaactccagggattctcagatcataattgagagtcaacattttaaaccacatatgtggttgtggataaatgcaccctttatgatgaaatggactttaaagtttcacgtatgtgtttttggcttttttctttcacttgtcttaaaaaatttaaatctcaggccgggcgcggtggctcacgcctgtaatcccagcactttgggaggccaaggcaggcggatcatgaggtcaggagatcgagaccatcctggctaacgcggtgaaaccccgtctctactaaaaataaaaaaaattatctgggcatagtggcaggcgcctgtagccccagctactcaggaggctgaggcaggagaatggcgtgaacccgggaggcggagcttgcagtgagccgagattgcgccattgcactccagcctgggtgacagagcgagactccgtctcaaaaaataaaaaaaaaatttaaatcccaacaattttgtttatatagtaaaaaggaaaatatttttgttatgtattcctttcctgtctcgtggcactgtgtgctatttggatctagtgtggtcctagactaatcctgttctcacatgggaacagttagagcccttacagctcttattttgcaaataaatgtatgaagtttatccaagtatttgaaaggaaattctgaagatagtggtgcattgaggaaacaccatctcattataattaaaatagttttaaaagtatatttattatgagtttttgtaaatcctgtgtctctacaatacatacatacaatgctgtcatgtatatttaagcttaaaatggttagacataaattatgttttaaaaaatttatatccacgaagaatcttaatggaaagcaaaatatgtaatagagactgctgagtgaataaaagtaagtaatagtaaccagtaaaaatgtagaaaagtgagagatgatagttaattaaacttacctgaatgaattgtaagcatagggcatgtaaaatataataagcctgaatgcatagtgtgttgtgggagagagcaggatgtgggactgtttctgtgaagaaagcatgtatacaagttagtcaaattattgtgttatttacatcctaaaaatgaaaacttcattttcgtatttttcagattggcatcctactaatttgacccttagtgatgagacttgtcagagatccaagaatctgaaagttgatgataaatgtccatctgtatcaccatcaatgcctgaaaatcagtcagcaaccaaagaactgggacagatgaacttaacagaacgagaaaagatggacactggagttgtacttctctcagggaatgatactctccatgacctgtgccaatcacagctaccagaaaacaaagagagcaaagaaggtaacaaagaagcatagagaattcagtcctagagtgcctctgcttggctgcatagagctatagttctgacttaaaaaaactttttctggtaaaatgtgctttgtgtttactcaccttttgcactgaacagaataccttttggcaggatatttgtgttcttcctttaaccaaagcaacatctagataacagagaattagggaaagcatgattttctttaggaagtaggattatatttagaatatagggactaagtatgtttagggactaacataggattatatttaggataatttagtagagacctaaagattgctgactcaaacacaatgtggtttctttgctttatttttacagctctgaattcacagctgttagttataactatatgcactataatttaaaagacaccttcccacacctgtaatctcagcactttaggaggccgaggtgggtggatcacaaggtcagtagttcgagaccagcctggccaatatggtgaaaccccatctctactaaaaatacaaaaaaaactagccgggcgtggtggtgaatgcttgtagtcccagctacttaggaggctgaagcaggagaatcgctggaacccagaaggtggaggttgcagtgagccgagattgcgccactgcactccaacctgggcaatagaggaagactccgtctcaaaaaacaaaaacaaaaacgaaaaaacaccttccaaaagcaaatattaagtgacttcctatcgtttctatgactttatgtattatagaattgactttccaagtcagtaattaatgagacttattgagaatttgctgcatagtatctccttggctgtgtccacatgagctaccaccttgcgttaataaatgtgttcgctagggatgttggttttggcattgacagtgttctatcaccaatgcaaataagaccagggaccactcttgagaacattaatgtccaagcatcttaaagttatacgtaaggctttcataatgtgacttctgctcagctctccatctttagccctttcccccgtgtgccccttctctggccttactgaactgctggtcctgtcctgctgacccatccttcgactgcaggcaaacacatacactctttcaggcctctttctgccttttgttgctgcctgtcatgctctcactctttcctgtcccctaccccttctaattaggctagcctcactctttaagcctcagctcgggcaggatctctagaaaagtcatctctgacatgctttcttttcactctttaaatcctagtgcctagcacatagcaagactcaatacataattgctgagtaaaatagataatgactctttgtacaaagatgattttcaagattgttccctacagtcaaggagcagagggaatagacatgtaaagcaataattgacagttcgggtggtggagatgcagtagaaaaatcagtaaagttctagggcagccctaaggaaggagatacctagatacctgtttacctggggaaagatgaggatgagggtcaacttcacctagcagtctgttttttattttatgtattttatttatttatttttagcagtctgttttaaaagatgaaaatattaatacatttgtcagaataatacagggaaccatttcagatgttaggaagaggttgtacaccaataaaggtgtccacagtcattttggaagtcattaatgaggtactattatgaagtggagaacagtatgcagtattgcctgataatattgctactgcattccaaaattttgttttgtttgtgatggctttgttcattgatgttgggtggatgaatctgtgagtgaatcttcaacatgattgtatttctttaacctggtggcatctagtgtctcccagaaagtggtttgttgaagttttggagaattagaagtatttcttaaagaagtaagtattccactaaagatcaagcttcatttaaactctcaatttatgaaataaaatgaaatgtaatttaaaatctatttttataaagactatgtcttttatctaactgttctaagtagtttaactgaacgtttggattttgcagcagaacaagacttggagctgacatcagaggaagagcaagaaagacttaaaggatgcgaaaataagcagccacaggtgtggaaacattcaaactaaaatctaaatgtctggtttaatactcttttctttgctttaatatgctagcccaaatgaaattacctctcagactagcctttgagaatcaatagatccttacttaatatttaattttaaatacatttaaactagttataaaacacaatattgttagaatctatcataacttatagttaatctttacccttggagtagaggcaaacattccagaattttgtttgctcttccattcttacaatatccttacgggataaagaaggtaatgtcaattattgacttatattattaagcaacagaaattatgaacaatttaacagtgatggccactgagttggattcatggtataggagtaatcatggccagtggctcaaatttttcagttttatattgccagttactaatgcctaggttaaagatgtggcctttcattgacttcatggtctacattcagtgagaatggggttatgaaatcaacccaactgcctattaagggaatcataccttgcagaatgggatctttggtgttagggtacaaacaataaatttctaactttttagatgcagaaacttagtaagaattatctttaaagttttagttagtgttattaggggaccgtagtatatattagaactgaactgaagaagatagtctagatatataaccctatgatgttacagtatataatttgaattaaaacttaagaatttgcttttctttctgattggtgttgattcgggctcctaataatttgaagattgcctaccctccagttagtaatctgtagaacttacatgtagtaatatatagtacttacatgtagtaatatgtagtacttacatgtactgtaggggctcactttccaagtgaggaggcctttgtaacactagaaatcatctgctaattcatttttggtagatttaacacataatgaattaagtttattccaaacaaacagtgacaaagttaagtttgctggttcatatttttctcctcctttcagctaagacaattgtttttaacttcttagttacaagccagtgatttgggagtagctaaacctagatgaagaagtttaacagttaaattttcattttaattatttgtgaatttttctttgttcatacctgttatttaaggacaaagctatttttaaaacatgtagcccaacagagaagacacgcaagaaacaaaacaagcaaattaatcttccacttttgcacctgcagaaaacgtctcaagaaccagaaatggctaaggattgtgatagagaggatatacctatatatccagtacttcctcatgtgcaaaaatctgaggaaatgtggattgaacaaggcaaattagagtggaaaaaccaattaaaactcgtcataaatgagttaaagcagaggtttggtgaaatttatgaaaaatacaaaattccggcttgtcctgaggaagagccactacttgataactctacaagaggaacagatgtgaaggatattccctttaatttgacaaataacatacctggttgtgaggaagaagatgcatctgaaatatctgtctcagtggtattcgagacatttcctgaacaaaaagaacccagtctcaaaaatatcatccatccatactatcatccgtactctgggtcccaggaacatgtttgccagtcatcttctaagcttcatttacatgaaaataaattagactgcgacaatgataacaaactaggcattggacatatttttagtacagataacaactttcataatgatgcaagcactaagaaagcaaggaacccagaagtggttacggttgaaatgaaagaagaccaagagtttgatttgcaaatgacaaaaaatatgaaccaaaatagtgacagtggcagtacaaataactataaaagcctgaaacctaaattagaaaatctgagttctttaccaccagattctgacagaacatcagaagtatatctacatgaagaattacagcaagacatgcaaaagtttaagaatgaggtcaacacattagaagaagagttcctggctttgaagaaagaaaatgttcaacttcataaagaggtagggttttacttgctgccactctttgttttttctctcaattatctggtccattctgattttccacttaggaaaagcatatgaaaagcatacagtttggttgtctaaatctgtaattgtgtgtagaaacagaggatttctaagtaataggagtttaggaaaactttctcataatcgttgtttcttaattgacctaagtctctctgtcagtcttccaagtggcgtatggattgtgaaactcatgtagccatatatcatgtgaccttcagaaccaggagaggcatcaagaaaatcgctaaaggaaatgtgatgagcttgagggctttttccttttaccgacttaaagatgagttgtgtctaacaataagatgggaatacagtagaaaggaagcaatgactaagtagagatataaaaatgtatctagcaggcgtggtggcaaacacctgtagtctcagctactagggagcctaaggcaggaggatcgtttgaggccaggcattctgggccgtagtgtgctatgccgatcaggtgttcacactaagttcggcatcaatatggtgacctcctgggagcggggcaccaccagatttgctaaggaagggtgaaccagcccaggtcggaaatggagcaggtcataagtaactcctgtgctgatcagtagtgggatcgtgcctgtgaatagctgctgcattccagcctgggcaacatagtgagacctcatctcttactaaaaaaaaaaaaaaaagaaaagaaaaaagaagtatccagccctgagagctgcagcaaatattcctggccaatgaatctgtttattgtgcttttcaggtttatctgtttaactcaaactgttggaacttagaattgcatcatgaccactttaaatatttttcaacaagtatatacactttaatatatttgttaatataactactctccactgtttctgttgaatcagacctttatgttatgttgcttaataaagtacagtaagttttggcatatatattttttccatgtaagtagcataaatgctcagccaaacacttagtatatgatgccaaagtagaaagctgagtcttctacattgattagggcaggcctcccaccctccgctaaggcattaaattattttacccaagtcacacttttaacctatctgattaatttgccgaatttgtctgattcagcattatggaattgtactgtctcttttggtgccacaaaatgctaggtaatggcactttaggggctttggatcaatcattttaatcttttttggctttagcccagttatcaatagagagtgagctaaagtagattcttatactgtatatcctccagctataaacttttatggctattgaatgtgaaatttgggaagcatctcatttccagaattccaccctagctcagcagtttcactctgctttttgtgttgtggcagacttgtatttcagtaagcaccttcacctttttgatatcccaggattcaaatgaaaaaaaaaaaaaagacaaaagttagtgggggaaaagaatagcttagtgcagaaaagggaaagcttcctttcttttcctgaaaccccacagtgttgtatcctctcaatctggctgtttaatatgaaagtcaagtggcaaagatagaagaagacacgctttgtgtctttatcttcttgtttccatgtttgtgccagtcaaatgaggtaaaaattcataatacatagtgaagggtggttgggaataaaagcacaaaattaagaagggccctggttgaaattttggaaaattctgtctcattcattgaaacagaaatgaagctgactttacaaaaatgttgatgataaaattataataattataattatatgatgatagttccagatgtgataaaattaaagtaagcaccaaatattttaatgactaaaattataattaaactgagtcaagtgatgatgaaatcaatgcaaacagaaaaaagttctttgtattgaataaagcaataagaatcatcctgaacatcaaactctcactcaaggttgaagaagaaatggagaagcacagaagtaatagcacagaattatcaggaaccctaactgatggtactactgttggcaatgatgatgatggactaaatcagcagattcctaggaaggaaaatgaagagcatgacaggtaagcctatagcagcgtttaacaggagacaattggtcaagcgtggtggctcacgcctgtaatccagcaatttgggaggccaaggcgggtgaatcacctgaggtcaggagttcaagaccagcctgaccaacatggataaaccccatctctactaaaaatacaaaattagccaggtgtagtggtgcatgcttgtaatcccagttactcaggaggctgaggcaagagaatcgtttgaacctgggaggcggggttgtggtgagccgtgatcatgccattgcactcgagcctgggcaacaagagtaaaactccatttcaaaaaaaaaaaaaaaaagcaaaaacagaaacaaaaacaaaaaacaggagacaattatgtgctatgaaatgaatcctaatttgggctaatattcatgatgaacagattttatacttttactaggatattcagccttccttggttatcagaaaaatgcaaactaacaatgagacaccatgttttccaatcatattgatattttatttaaaaaataggaagtattggcaaatgtgaagaaaaaggcgtaaattcatacacttgttaaatgaaattgatgaatcctttttgcagggtaatttagtagcatgtatcaaaatttcaaatatgtcacttctttaacctaacaacttcacttttgggacaagatcctacaggaaaatatgacttgtgtaaacacatacacatatgtgttaaggacatttattacatgtagtatgtaacatacaataggctaataggttaaatatatataatgttaagtatatatgatatatttatgtcaaggatatttatatgtgttacatatatatttatgtataaggatatttattatagcattgtaatataaagaagttggagatagtctaaatccttagcaataaggaaatagtacaattgtcatacccagaaaataatgtagcatgcactcattttaataaaagaagttgttagaccaggagtgtactgattatttcacaattaaagtctatttaaagcctttagtttgatgacacatcttaagccagttttgttggaattctcgtaatatctgctgagttacaaaaggaagctagctacatgctacattgacactgtaccttgttagcaacagaattctagttattaaatttttgttttttgctgtccatgtgtgagtgctgaaataccagatcctcaaattaatctgaatattgccaagggattgcacatggggattcatgttccgtgtcagcttttcaatatactgggtaaaacttactaaaatacaacagaggatcttagctctactgaaccaagaattggacagctctttttgtaaagagccagttagtaaacattttaggccttgtgaattacaaagggcataagtgtggctgcattttaaggaactttccttatgaaaacaggcagtgggctggatttgctccacaagcaccgatttgtttatccttgtgctaaaaccaaggtgctgttatgcagtgaatcctctttttaaaggtaccctacatgcatgccattatcctttcttttaaaagataatgtatttcagtaggaaacacaccatatttttcaacagtagcttcatataatttagacaaatttgatttacaaaataagattattttctgcccttgtccccttttattcttgtcatagaattccatattttgactattactttgtatatttgatgagtataaaatattctagagttagatggtttttatcaagcaagaaatacttctcctgaaacttttagtcttctttggtctttatgtataagcatgagcaaaatgataatcagcttatataatctagaaatgttcaagaggtcttttggttttataagttaatgaatttttatttaataccttcatctggcatttcaaaaatgccatatatatcattttaaaaaaacttttaaagggtaaaaatatagtatatagttatataagaattgaaaaatacagctaaacaagaagaaaattagatcgtctacagtcatgcccctaggtatgctggccttgaaagaatggtttatactcatggattcagatttcttgtccattctctcttgagctgatacgagtaattttcactcccaccactcttccaagattgttgttctcaagtttaccattgatttgtaaatctagacattgtttcttagaccttattttatttaacctgtcagcaatattggacccaatggaaaactctctcctccataacagtgtcttcacttggctttcaggatctcactcactcacctggcttttcttcctgcctttccagtccatctgtcatagtctgttttgctttcttctcatatcccaccttttacacattgatatgtcccaggactgatatgtcccaggactcagtcctcaatcttctttctcatgacttttactaccttgtgtgtgctaatgatttccaaatgcgtgtctccagcctagatctctctccttaattccagacttccataccaacctgcctacttgacatctctgtttgattggtcacaaactgttgggtatcacaaacttaccaggtccaagattggggtaccgatattctttctcatacctacccctcacatggtctttcctacttgcattaatggcaactcttgcagttgctctgctagaaactaaggtgtcgtcattgactcccctctctctctgacacctcacatctaatctgtcagcagatcttgtcaggagtacctgaagaatatatccagaagccagtcatatcttccatttccaagccaccaccatctgctctctagatgcatgtaatagactgttaattggtctgtttttttttttaaagaaacctcttttcattaatccttaactcagtggccatacttaaaacataagtcagatgatgtcattcttctgctcagatccatctgattgcctcccatttcactctgagtatgtgtcagggttcctcctcatacctagaaggcaacacacaatatgccctgttctctctgtcacttaaacttctgtttcttattccctttgctgtgcttcagctacactaaacttcttgctcttcgttatctatcacagttggaaggcaacacacaatatgacctgttctctctctcacttaaacttctgtttcttattccctttgctgtgcttcagctacactaaacttcttgctcttcattatctatcacagttgcttaaacaccccaggcacacctctgtactgggcagttccctgtgtttgggatgccttttcctcagatagcctcctggctttctttttccattccttcagttctttacttaaaagcccctttctcaataaggacttttctggccatcctagaattcccactatccctcctctcaaacctgtaaacatttcattttcctgctttagtttttctcctttaacactgtatattttgcctaatctatctatggttattgtgtttatttcactcccatgagtaggatgtttgtgtgcctagaaaagggcctagcttgcaataagtagctactcaataaatatttattaaatgagcaactgaagtttacccttcggtgtattgttttaaacattagattgattctcaggtaaaaaaaaaaaaaaaaaaaaagaaaaagaaaggtttcacatgggttcattctaacacttttgcctggaaattatatgtgtttttggattttttggctctttgtaataagctacattctttgtattaatagttttccatttagagagaaaagctcaatattgtcgttactcactatttattcttttactaataatcatgatagttttacttatgataaaatggatcaaaggaattacatagttcattggtaatttataaagaaaattaaaatataagggtggtaaatttaatggacttaaaattgtttccaattgattatgaaccttcagtatttgaagttaaaagaccaagttggaatgtgttgctttctataagagagctatgctcatcaggcactctgtattctgatagagcagctgttgatcttacatagggttgcgggaggagcggacttgaagcattggcagactctcagcggcataagagggttaacatcatctggagaaacatggctatctgagtgaggctgctgtgggttggttaacactcccaggcttgtggattggagcgagtttgtgtttaattggctgtctttccaaagcaagtggcccacattgatattggttggtgagagaggccaatggtcactgatgattgactgtatttacaactggctgtgggtggttgcttgttacaaatatagctactaagtttgagacaactttaaactgcagttttctgtttaaaagttgccttccatcaactatgtttaaaatgaaaatgatttcatattccagaactatagacttaatttggaagtgtgggtcaagaggaattgtttaataattgctctcaggaagatctctttttttgatgcttagtcttaaccagaagaattcgctacatagttaaaaaacaaacaaacaaacaaacaaacaaaaagcaattattaattttgtttcggtttttagtattttcagagacttctgctaaactcctaatctccagtgggatatgtttgtctctttgttaatgtatgtagttatatgatagtgatattcttttttttattccttaatctttttttgttcactttctcttccatgcaatgatagtgatataatgtgtgtttacttcataaaaaagtaattacaattttctgctggcaaatccagctttttatattaagactaagtactagactaaatatgtgggaaatttaccaaattattttattttcaaacaaacatataactaatcagaatattgctatttttgaacaatatataatgactatactgatatttaggaattttaacactaagatttttttcttcccgagacatttccttgatttctttcatgtaatatgtgcctgttatttttaaaacttggtttaatctgtttaaacattattgtatttaaaaacaaaacccaaaacatagcacagatctaaatatgagtttcatgtgtgagagtcattgcctgtgtgcagtggactccagctgtttttttttttttttttgagacgcagtctcgctctgtcgcccaggctggagtgcagtggcgccatctcagctcactgcaagctccgcctcctgggttcccgccattctcctgcctcagcctcccgagtagctgggactacaggcacccgccaccgcacccagctaattttttgtatttttagtagagacggggtttcaccgtggtctcaatctcctgacctcatgatccgcccgcctcggcctcccaaagtgctgggattacaggcgtgagccaccacgcccggccagctgtttttttttcttttcttttttctttgtgacagagtctcactctgtcaccaggctggagtgcagtggcaatctcagctcactgcaacctccagctcctgggttcaagcgattcttctgcctcagcctcccgaatagctgggactacaggtgcgccaccatgcccagctaatttttgtatttttagtagagatgggtttcaccaagttggccaggctggtcttgaactcctgacctcaggtgatcctcccaccttggcctcccaaagagttgggattacaggcgtgagccaccgtgcccggcctgtattttatttttatttttttatttttgaggacggagtttcgctcttgttgcccaggctggagtgcagtggtacgatttcagctcactgcaacctccgcctcccggcttcaagcaattctcctgcctcagcctcccgagtagctgggattacaggtgcccacgaccacacctagctaattttttgtatttttggtagagacgaggtttcaccatgttcgaggccaggctggtctcgaactcctgaactcaggtgatccacctgcctcagcctcccaaagtgctgggattacaggtgtgagccactgcacccggcctgtaagtaattgttattttgttttctgttatatgcagccatctcctgatatatgatctgggccaccctcttagattcaaaggcagaatcaacaggaatctgatctaactgttctgagccctggagcttgggcccaggcctgtctcctcggcttcctcctggatggtgggctgcgagggcggttacagcattgtccatccatgtccccagctctgagtccctcaccttccagactctcctcagctgtcaccaactgtttgagttagtttccccaggcctctcagcttctacctctaaatgccagcaaaggagtgaaatcacacaccgggaaagcctgtgggaggtggaagcttcccagagcagggcctcagtggagacaggatttccgcaagcaaagaagggaacaacagcacaggcagagctgcagaggtagcggaggggctggagggcagctgcactgagggcaggtgcccagagggagtgggagggaagtcaagacagacagtccacagggactgcaagcagggcagaagacctgtccttcaggccggcagattttaaaaaataaactttaagccaggtgcaggggcacatgtctgtagtcctaactacttgggaagctgaggcagcaggatcactggaatccaggaggctggggctgcagtgagctatgatcacaccactgtactccagcctgggcgacagagtaagactccgtctcaaaaaaaaaaaaaaattaaaaatgagttacttatatcatctggatatatgtcctttgtcatcggatataggtcctttgtcttcagatatatgtagtgtgaatattttctcccaatctgtgtctttcgatataggcagttaaaaaaaaatgaatgtatttaatcctttcaaaggctctacactattttgggagaatgagagggcttcaatctgttacacacagacttagagtgatatgtcacagaattacatctaggtaagaagcaatgtgatgctgggcgtggtggctcatgcctgtaatcccagcattttgagaggccgaagtgggcggatcatctgaggtcgggagttcaagagcagcctgaccaacatggagaaactctgtctctactaaaaatataaaattagctgggcgtggtggcgcatgcctgtaatctccgctattcgggaggctgaggtaggagaaatagcttgaacccgggaggtagaggttccggtgagctaagattacgccactacactccagcctgggtgacagagcgagactctgtctcaaaaaacaaaacaaaacaaaaaaagaagcgatgtgttaggtaagaggtaggtgtgttccttaaaaaagtggcatatcaactaaatctgggtgagttaggcctctgagggtggccgtttgcaggtctgtaacatctaagggggagagatttttatttatttatttatttattttttatttatttttttattttttttgagacaaggtctggctctgccgcccaggctggagtgcagtggtgcaatctcagctcactgcaagctccacttctcaggctcaagccatcctcccgagccatcctcctgggcactactggtgatacttgctgagtcacagcagcactccacccgccaggacttgtttttcatttccataattggaaagtgcagaatcaggggcagatgagtagctggaactacaggcgtgtgccaccacgcctgactaattttttgtattttttgtagagatggggtttcaccacgttgcccaggctagtcttgaactcgtgagctcaagagatctgcctgactcagcctcccaaagtgctgggattacaggcatgagccaccatgcccagccatgtgtgaatattgagtcacacctgtgtgagagacagctggatgtgtgtgtgatgtatgagtgtgtgtgatttgtgaatgtatgtgtcatccacatggggaacatttgagtgtgagtgatgtcttcatgtatgtgtgagatacctgtgtgtacatatgacatcagagtccttcactggacattgcaaaggacgctggtggggtagggcctctttcttactgagttcacagaatgaagtgccataggggcctccaagtgctggtggccctgttggcattactgggcagagcttgcctgagaataaaatcaccaaagaaagacaaaaccctggagatagtggagcactggatctagccatacgaagctgtcccctgggctttttagctgtggaagtcagcctcacccctcctcagttagcccctttccctttacatttagctggttcaagctgagttttattgcaaaagtcctgactaatacaaatacttatgatagaatgtgaatggggaaagccttccatttactaagatttcaagcaaatgcaagatttgaatgcttcagaaggaggtacaccagccttaccccctggaggccccaggaagcaaagccaccaaggcaggcctcagcaccaccaggccccagtccttaggcctccctaggaggtgcttccagtgaagggggaaggaaaaactgcttgcaggacagtggcataggggctctccagctggggcagggcagtgtaggtaggggaggagatcagtgggcccgaagtttggcttagggtgctcctccctccagcttaagggagggatttagagaggctgagccagagatacaaggtttggagagtgtttgttatgattcgggctagaggccttggcgatgcctgtctttggcagggagagacccgataaagttgagttggggggtaatttaccgggggatcatcagtccctgattctgcactttccaattatggaaatgaaaaaaaagtcctggtgggtggggtgctgctgtgagccagcacagtgtcaccagtagtgcccaggagaaagctgttgagagtagggtgtgggcaaagggctcaaagcccagatcttggctaggtgctgccaccaggaggaggaggctgccacgggggcctgtgtgtgggccgtgccaaccttgctgtggctttggtttattgacattaccataaatatgttattctactccatccacctcaatagtgacatgaagtaggtggcattagcccatttacagatgaggaaactaacagagagaaatgacttctaaggttgtacagctaaaatggtaatgctaatgctaatatatatatatatttttagacggagtctcgctctgttgcccaggctggagtggcaggatctcagcttagctcactgcagcctctgcctccctggttccagtgattctcctgcctcggcctcctgggtagctgagattataggcatgcaccaccacgcccgcctaatttttgtatttttagtagaaacagggtttcaccatgttggccagggtggtcttgaactcctgacctcaggtgatctgcctgcctcagcctcccaaaatgctaggattataggcgtaagccactgtgccgggtctacaaaactccttctgtttttttttttttctttttcagaccaagtttcactcttgttgcccaggctggagtgcaatggcgtgatcttggctcaccacaacctccgcctcccgggttcaagcaattctcctgcctcagcctcctgagtagctgggattacaggcatgtgccaccacgaccggctaattctgtatttttagtagagacgaggtttctccatgttggtcaggctggtctcgaactcctgacctgaggtgatccaccctcctcggcctcccaaactgctgggattacaggcatgagccaccgtgcccggcccaaaactccttatatatccagagagcatatatattataaatatttaacctacctagtatagcttattggatactaaagcaggactttgttaaactcttagcatgcagtggatcatctactatggtcactgtatgaggtgggtgctttgccattcccagctgtagccccaaccctcagcactgggcctggcatgagttaagtactttattgatatttgttgagtaaatgaatggaggtaaaagtcagctagcaaggcagccagggtagctacaggcagcctgatttggacaagtaattttattttatttttaatttatttatttattttgaatctctgaaagagtttcacttttgtcgcccaggctggagtgcaatggtgtgatcttggctcactgcaacctctgcctcttgggttcaagcgattctcctgcctcagcctcctcagtagctgggattacaggtgcctgccacaacgcctggctaattttcttgtatttttagtagagatggggtttccccatgtcagccaggctggtcttgaactcctgaccccaggtgatctgcctgcctcggcctcccaaagtgctgggattacaggtgtgagccaccacacctggcccgtggacaagtaattttaaaagcccagaaaacattgactattcacttggacaagctaaaaataatggatggtgcctggtgttggtgaagatgaagagacatggatgctcttccaccttcctggtgagactgtaaattggtacaaaatttcagggaacaaaattttaaaagggcatatcctttgaccaaacaagcttacctctagaaatttaacgtgaggaaatacttgggcaaaggtagaaagacaggttatgtattaatagtaaaaagtgcccagaatgagggattagttaagagaaaataatggttcatccatatcacaatagctcataatcgctgcggttaatagaaagtggtagtcaactgtgtgccagataactcaagtggtcatcaagattcccctatgacatagatgctgttattattcctattttgtagatgaggaaacaggtatagagaggttaagaaacttgttgaggtcacacagctggtgaggagagaaggaatttggatctaggcgctggttcccaagactacagtctttcattcacagctcatatcatgatgatgtcgacctgaattcatcaacatggaatcatgcctgcaataaattgttacagggaaaaggcatattggaaaattccaagagtggctacctctccacatgggataatggcaaatatctttttaattttttcttctttctcatttgaatttttcttacaatgtgtaaatattattatgcttacaaaagacaatgaagttcttagtcccagctgctggggagctgaggcaggagaaccgcttgaacccaggaggcagaggttgcagtgatccaagatcgcgccacggcactcaagcctggatgacagagtgagactcagcctcgggaaaaaaaaaaaagacaatgaagttcctttcattttgggggaaaatagaaaaaggagaaaagaggacgggcacagtggctcatgcctgtattcccagcactctgggaggccgagatgggtggatcacttgaggtcaggagttcgagaccagcctggccaacatggcaaaactccatctctagtaaaattacaaaaattagccgggtgtggtggcatgcacctgtagtcctagctacttgggaggctgaggcaggagaatagcttgaacccgggagggtggaggttgcagtgagtcaagattgcgccactgtactccagtctggacaacagagcaaggctccatctcaaaaaaagaaaaaagaaaagaaaaaggaaaaaagctggaggatgcaggaaaggactctataggaacttccaaggcctccttggctggtgacctggctttggcctccgctgcctcctacagccaggcaagctgccatcctcttccactggggaaaaaggggtgccttgtttttcttccctgatagccagacaggcgagagcagagaggcagctgcaaaagcttcctcggtgcctcatactcatggactccatctaaaagtaactcctcacccccaaccatcatatggctgctaatattagtgctcatttttccactgaggaaacagaaacttagagaggtggatctgtccagggtcatttccacaatgaggacaggaggcaggaagcaggctccatcctagtgatggacacctaagtccctgttttttcatttgcacaaccatttgaaggagaatcctgtgttttttgttacaccatactgctcaaaaatttctatcaaactatagcaaagattcctttccttcctttaaaaaatgttgaagggaaatgtcttagacttgagtatcttgatttatagtcgatatacagcagtttagcccttgaatatggccaatgacgtgttgcagcaagctgagcacttctattacatgcaaagactctgactgcaaacatccaagtgggcaagggattatcaagtttagcaatggactaaccaaaaactgcattcgtgtggaactgaccacaagctttacattatgcttttgctcctttcttgctcattacccattgtataacaaaatatgcccagacttgggctttaataaaaaatttcttagctctcaattttttgtggtttgattggtcttagctaggtggctcttgcttagggtctttcataaagttgcagtcaggtggtggctggggctgcagtcacctggtgggtcagcttggctgaacacctaccatggcacactcctatggcctaaaccccaaggataaagagaatgagagttttgacatcagcctacaagggatttcaatagtccttggagaatggatggcggatggaagagtggtattgctataacagaacaaatgaaactacaaactaagtgcctgcagtgcgggaaactattgaggagcaagccaccccactgcagaaccctggacgcggtgatacactggagctagctcattctggttaatgagagtggattttttaaaaaattcaaggccaggtgtggtggctcatgactgcaatcccagcgttttggaggtcgaggcgggaggatcacttgagcccagttcgaggcggcagtgagctatgattgcaccactgcactccagcctgggcaacagagcaagactctgtctcttagaaaagtttttttttttccagtaatattattcttgtatggtgcaaacactatataatgctgcgctactgcccattttctttccagaaaggataaggcactcaattttccagacatttcttgagtaccatacttgtgccaggccctgggaaacagtgatcagcaggagggacgaagagcccaccctcatggggcttacagtgtacaggggctgaggtggtgatatttgtcaaataaccacccaaacacttaattagaaatcgtgataagcccaatgaaagaaaaatacatgaaacagttttatttgggaagggagtggtttagggaagactcgaaagtgacaatggagctatcaagttcaagaaggagttagtaggggaggaggctgcaggaagaagtgcacgcctggaggcaggaacagcatgtgtcccggtagttcagggtggcgggcccaggcgggtgagaaagggcaatggagaaggaaggagaggagaccgtgcagacactgcaagtgccagaaacccgatccacactggcttcagagggtggaggggaggttcttcttggcttccataatagaaatgtccagggacctaccgacttcagattcagcgcaaactcatctgggcccggtctgtatccctccctctcttttctctcagcactttcctcaggcggttcccctcctggcatcccagcagctgcagcatcagcaggagagagtaagcctctccagtcccggcgcagggatggagacggtgtttcgtgggctccgattggctcagtagcctatctttggagcgaatcagcgagcggagagggatgaacttctctgactggccagatccagtcacatgccaacatgtgacgcgtggaatctacgccagccacagcagagaggtgggggttgtgaccggagttagatgccagcgcagaagggacgtgagcccagccgaggtaccgctgaagaggaatcaattttggtatgcagataatcactgggctcatgggtcttgctctttacaaagaggtatgtccctgtaaagttgtcaggcaaaggaaatgtttcaaacgactccatttcacgaagtctcacctaatttacaattcgttagttgagatgcttgtattcttcgtttctaaaataagacgttgaaccataaagactctagctagctctgcaacctctgatgaatatttcatgcctcattattgtgaaaaatccaaagcagaattggagagaagatgtggtatagggattaggtaagtgaagactggtgcaaagcctcctgggtcgaaattctgtccactgctttgtcattggaaaagttatttaacgtcgtcgtctcagttcccacaactattaaaatggagaggataacaacacctaccttatgctcttgtgaggattaaataagttaccgttaatatatgtaaagcacttaaaagaggaccatgtgtttgctattattatgttatacatacaataaagagtaaacattacctaagttataaagaacttaggcaatggataccaaaagtactaattcctttataataaaagaaaaaaaggcgacaaggcaaataacgataataactgataatggctgggcgcgatggctcacgcctgtaaccccaggactttaggaggcggaggcgggcggatcacttgaggtcaggagtttgagaacagcctggccaacatggtgaaaccctgtctctactaaaaatacaaaaaattagtcgggcgtggtggcgcacacctgtaatcccagctactcgggaggctgagacaggagaatcgcttgaacccgggagacgaagtttgcagtgagctgagatcgcgccgatgcactctagcctggacaacagagcgaaactccgtctcaaaacaaaaaactaacaaacgaacaaaaaactgatcatttattatacacccagaactgtgcttttagcacagttttgttttgttttgttttgtttttgagatggactcttgctctgtcacccaggctggagagcagtggcgcgatctcggctcactgcaacctctgcctcccgggttcaagcgattctcctgcctcagcctcctgagtagctgggattacaggcgcgcaccaccacgcctggctaattttttttttttgtatttttagtagagatgggggtttcaccatgttggtcaggctggtctcgaactcctgacctcgtgatccgcccgcctcagcctcgcaaagtgctggaattacaggcgtgaaccaccgcgtctggccgtattgtctcatttaatcctcacaacagtcttatggaatgggtgctgctatctttgtttttcagatgaggaaacaagctcagagggttgaaatgacttgtccaaggttacaggccagtggaggcttgaacccaggtatttgtaattccaaatgtcatactctgtccacattcattccttgtaacctgcctgggctgtcacagttggtgtggggctagcagctccccagggaccaaaacaggcgcatccccgcccaccgccccgcccatcgtgccagcccgactccacccctgtggctacacccactgccccgcgccttacccactggtgggccacgcccacagcccccagctaggtgcctccgctgtccgggctctagtcccgccctcgcccctccccgcccaccggcctcgcagtcaccgcggacgccaatcttgtgcatggagtcgccattttgctcctagagaggccgccaggagacccggcgctttcttccttctgcagctgaggctgcggcggggccggggctggggtcggggccaggtaggcgggcgggagccagtggcgagcggcagcgagggctggctggctccggcattgcggggcgcaggtgcaaggggcggggagcccgcggcgccggcaggcggacgggtcggggtccctgggtggtggctgcttgggggctcactggggcgatctcgcgcccgcggcccttccatttttccctcccttcttcctctcccgccaggggtcggcgggggcgggggacgggcgtccggtgcctgggctctctcctctccctgaggcgccgctggggagtcgaaccctgatgatgggacctgtggtgagcagccctgaaagcaagcccagacccagccattctccgtccctaagctgacacggagcccctgattttaatttacctggctttgctagttacgaatatatctctcacctcctaaaggatgattttatccaactcagaactcaccccagcagagattgagggggaaccgtgatgaaatttttaagtattctgcttgatgataataatttttctcttatgttaatgttggctccgtttgggtgtttagcttttgaaaggagtatgaaaatgcggaatggggctttggggcttgaggtgtgatctctagtgtttaaaaaatttaattgcacaaatagaaataattcacccacattattgaaccccactaaagcatatcctttttgtccatattcctttcctgctgccctcgtgtgtaccattattactcagttgtgatttgagctcgttccacttaaagtcattcatagatacttttgcgtcgtgttgaatatttattgaatttctattctgtgttttacttaattactttattatggaacctttacacaggtctggtgtacttgttctttgaaaagtcttatgttgaccaccatcactgagcatatagctttttccttatttccttgggataattacccgaagtggaaataccgaatcaaacttctgttttctttctttggcactattatataaattgttttccaaacaaggcatgtttacaatagacatttttcaaaatctgggtatttgtcctattttgctctctgtatgcagaattcagcggggtgccaagtcgttttctgtgtgggttgagagacaggctgtgcagcccactgttgcataggactaactactacaaatcatgctgagaccgagctatttttgctgcttagaggctttgcagccttgagtaagtttcttcatctggaaacctagcttccctgtctaaaatgggtctcattctagtgcttgcttcactgggttgtcataagcattgtgaacactcagatgttaggcatgagttaacattgtgttggagagataagcagagcctgggatcatacaggagtggaagagtaattcggtttagaatttgcccttcaaattctcatcaatattgatattaaaaacagatttccttggagtgaggcacatcactaataaacatacataataagtttttttatttttattttttttgcagagtcttgctctgtctcccgggctggagagcagtggcgcgatctcagctcactgcaacctctgcctcccgggttcaagcgattctcctgcctcagcctcctgagtagctgggattacaggcatgcgccaccacgcccggctaattttttgtatttttagtagagacagggtgtcaccacgtttgtcaggttggtctcaaactcctgaccttgtgatctgcctgccttggcctcccaaagtgctgggattacaagcgtgagccaccatgcccatccaataaacataaatttttatactttttaattttttgacacagagtcttgctctgttgcccaggttggagtgtagtggcgcgatctcagctcactgcaacctctgcctcccaagttcaagcgattctcctgcctcagctgcgcaagtagctggggttacaggtgcatgccaccacacctggctcatttttgtattttttagtaggggtttcgccttgttgaccaggctggtctcgaactcctgacctcaggtgatccgtccaccttggcctcccaaagtgctgggattacaggcctgaggcactgcgcctggccggtttttatactttatgatgccttttagttcatctttcaatttcatttgttaatcattgtgactcattgaagtcaggcattattcagcaatcatttgtttagcctctaccgtgtggcagctgcacagggtatacagcagagaatatcatggtaaaaaatagtctctgctgcctggaccttaaattctgatggggaaatctttttaccaaggttatatctcttgtctggaaggtaaaggctgaggcccagcaaggacaagtgatgtccacatggcctagtagctggaaggcaaacccaactcttcacactcctacttcagccatctttaagtagaaggtatttacacagtagatgctttagagggaagacaacacacttcaatgtgagtcttccccatctgaaatgtgggtgagtggttttgaaatgactgctagtctgtccaaaggaaatgatctctcagtgtggtttcttcattcatgagacttaacattctaaaatcttattcaaaagaggagtatgatttgctctttaaaaggtgctaagattctctgaaaacggtgtgttttcatacatgttataaataattctcacacattctagagtaaatttagaataaacataaagcagttatagctcatggggaaaataagggagtgttctcatttcacactaaaaccttgtgctaacaagcctcctgccagccccatctcgatgattattatgtttttgaggatagtctttataactcttttcttgaagcttggtaaagaacacagccttaattaccaacaggagaaaggagaactaaaactacaagcaggcattatggccgggcgcagtggctcatgcctgtaatcccagcactttaggaggctgaggcgggtggattacctgagcttgggagtttgagaccagcctgaccaacatggagaaaccctgtctctactaaaaatacaaaattagacgggtgtggtggcgcatgcctgtaatcccagctactcaggaggctgaggcaggagaatcgcttgaaccggggaggcggaggttatagtgagccgcaatcgcgccattgctctccagcctgggcaacaagagtgaaactccatcttaaaaaaaaaaaaaagaaaaaaaagaaaaataaacagcccttatgtttgaataacttgtgaagtgaatagtcacaaaacatgactatgttgatagtcatttccaagtggatgctccccagtccactccaccatgtcattttgagggtggtcttaggttaggattctatatagaagcctatatctgaagtctagaacgtcagagaccacatgcagggtgttgcaggccattttaaaccatgagagataaggaaagacttcaggaaatatcctggaaaaaatatacaaaggcaggagagctatcttgaaatagtttggaggccatcctgtggaaaaggaatttgatgtttcccataaatctctaaggagagtacaagaaccagtgggcagaagctgcaggaagaggaatctcagcatgttcttttgtttgtttgtttgtttgttttgagacagtcttgctctgtcacccaggctggcgtgcagtggtgcagtctctactcactgcaacctccgcctcccaggttcaagcgattcacctgcctcagcctcgtgagtagctgggactacaggtgtgtgccaccaggcctagctaatttttgcatttttagtagaaatgaggtttcaccatgttggccagactggtcttgaacttctgacctcaggtaatccgcctgcctcgctctcccaatttgctgggattataggcatgagccacggcgcctggccacagcatgttctaaggaagaatttggaatgatgggccctcagcggatgtgggcatcagaccctggggctgttcaagcttctgttgagtggttccttggcaggattcctacagatgggctttgaacaaaagatttaggagggatgggctgaactacctctaagatctcttcctacctctaaaatactttcattctaagtgttccaactcctatcaggaatcctgctgtactttaaggagcttcttatttgaaggttagggggtgtaaaaaaaatgcccctccccccatggctgttactgtacttatatggtagataatcaagatgttagaagtcagttcataggtagcatgtccgatatgcagggcactgtgttaagtgccttgcagaaattttacagtcacctgtggggtcagttttcacagttgtatggatggcagaactgaggctaagagattttgagtattagataacttatgcaagtcctcactgtgagtttaggggaagtatttcaagatgcaaacatgagtttgactccaaatcctgtatttacaactacaggaaaattagtttgtttttatttattttcctggacctgtaacacccttttatttatttatttatttatttatttatttatttatttatttttctgagacagagtctcgctctgtctcccaggctggagtgcagtggcatgatctcagctcactgcccacttcgcctcccaggttcacgccattttcctgcctcagcctcccgagtagctgggactgtaggcgcccaccaccacgcccacctaattttttgtatttttagtagagacggggcttcactgtgttagccaggatggtcttgatctcctgacctcgtgatccacctgcctcggcctcccaaagtgctgggattacaggcatgagccaccgtgcccggcaattttttatttatttatttttttatttttttgagacgaggtcgcattcccatcgtccaggcaggagtgcagtgaagtggtgcaatcatggctcattgcagccctgaccatctgggctcaagtgatcctcccacctcattttttgatttttttgtagagactaggtctcactatgtagccgaggctggtctcaaactcttgggctcaagcagtcagcccaccttggcctcacaaggtgctgggattagcggtgtgagttgctgtgcctggccataccttttgttcttaaacacacatgtttattggttgagagatggctttagaagtatttaagatcccttccagaatgttgatgattaaacgtattctttctttcttttctttctttcttccctttctttcttcttctcttttcttttcttttctttatttgaaacggagtctcgctctgtcgcccaggctggagtgcagtggcgcgatcttggctcactgcaagctctgcctcctgggttcatgccattcttctgcctcagcctcccgattagctgggactacaggcacctgccaccacgcccggctaatcttttgtatttttagtggagacagcgtttcgccatgttgtccaggctggtctcgaacccctgacctcaggtgatccacccacctcggcctcccaaagtgctgggattacaggcgtaagccactgcgtggccttttttttttttttttttttttaattttttagatggagttttgttctcattgcccaggttggagtgcagtggatctcagctcactgcaacttctgcctcctgggtttaagcgattctcctgcctcagcctcatgagtagctgggattacaggcatgtaccaccatgcctggcttatttttatttttatttttttgtatttttagtagagatggggtttcaccatgttggtcaggctggtctcgaactcctggcctcaagtgatctgcccacctcagcctcccaaagtgctaggattacaggcgtgagccactgtgcctggccgtatataatttttatggaggtcacatgtataaatgcatagaaaaagtcttatgttgtccctaccaaactgataagaaccctcacttctggggaggacctgggatcgaggctggtgactttatccttaactatcatgtttcaggtttttttttttttctgagacggagtctcgctctgttgcccaggctggagtacagtggtgcaatcttggctcactgcaacctctgcctcctgagttcaagcgattctcaagcctcagcctctagagtagctgggactataggcagccaccaccacgcccagctcatttttgtatttttagtagagacagatttcacccttttggccaggctggtcttgaactcctgaccttgtgatccgcctgccttggcctcccaaagtgctgggattacaggtctgagccaccgcgcccagccatgtttcaggtttttatagggaggatgtgtttgtgttttacttgtataattaaaatttgagaataatgaaaaagattagcttagtttcagctcattgatgatctacaccagccttcccagaggtcccaggtgaacatacaactgtggaaatgcagtgggcttgctgagaaagggcccccctgcccacagcctgctggattgttgctgttcctcccatctagcatctccattatgtgatgaggacactcagcaatgatgacgactttttttttttgagatggagtcttgctgtgtcgccaggctggaagtgcagtggcacgatctcagctcactgcaacctctgcctcccaggttcacgtcattctcctacctcagcctcccgagtaggtgggactacaggcacgcgccaccatgcccagctattttttgtatttttagtagagacagggtttcaccatgttggccagggtggtcttgatctcttgatctcgtgatctgcctgccttggcttcccaaagtgctaggattacaggcgtgagccaccacatctgaccagcactgatgatttataagccagggacctttttatttttggcccactgccaaaatttgggtgtgaccaaaactgtcatttgggtggtcgcttaagtgtccttcaaggtgattatctagtcagcccgtgttccacttgaggaaaatgaagatgagaggtcagttttagacatgacacagggcagctgaaaggccgggaaaggttttatggtaaacaaggattacaggaaaagctgggtgtagatgggtcatttattctttgtctaaggattaatcagtccttgttctcgctaatggctctgccatttttctgtgtgttaatccaggaggaattttgttgtcagagaataaaaggaggttgtccataattgactttaagcagcaatcagtaaaacattgagctcttcagctccgcctttcttgtaagtttatcatttcttcttagtggttgtgaacatcatgtgataatgtatttccataaatttaggaccctgaaatccaactgaactttctgtttgtccatatatatctaatatttaaaaaatactattaggatggaaactaatttccttcagctgaagtcatttcctttaaaaaaaattcattcaggtatatttcatatcatatggcagtttttaataagtattatatccttctaggctctgaaaattggaaaaccaagaaggttttgatgttttgtgtgacgccacctgaattagaaaccaagatgaacataaccaaaggtggtctggtgttgttttcagcaaactcgaattcatcatgtatggagctatcaaagaaaattgcagagtgagttataattgtaccattaaaatctatattcattatgtgatgctttaaatttgataatcagattagcagttattgttaaatttgaaagcagatattttataattataaaataattatatctttttttcatcatgtatcttttttttcatcatgcaagatgttcatgtagtatgtctcatctgtatatattaagggctattctttttgtaaactatcccatctccctacatattctttcagcagacatttattgagtgccttataagtgccagggattgtgttagatgctatatatatatataattatttgagtataaagcacactggggccaggcgcggtggctcacgcctgtaatcccagcactttgggaggccaaggcgggtgtatcacgaggtcaggagattgagaccatcctagttaacaaggtgaaaccccgcgtctactaaaaatacaaaaaattagttgggcgtggtggcgggcacctgtagtcccagctacttgggaggctgaggcaggagaatcgcttgaacgcaggagggttgcagtgagctgagattgcaccactgcactccagcctgggcaacagaacgagactctgtctcaaaaaaagaacattaacatgtatattatatgaaataacttatagcttatagtttagtataattttagatatttattaaacaaatattgtacccctactactgtgtactagaccttgatctagatgttggggattatcagtgagtcaagatccatcctttttatgaaatttacattttagtatgggagccaaacagaaatcaagtcaacaaaacaaacaaggtaatttcagatgatgtcaatgctatgaagaaaactgtgtgaaagtaatgatggggcaggttgttctgctttagcatgtgtgctgaagtgcttttaaactgaagggatggtgtgtgagttgagaaacctgaatgagccaccaagtgaaggtctggaggcagaacccccccaagcagaggggacagcagattccaagcctctgcagcatgcaggaggagttcttggtgtgtctcaggaacgtgggctggagtacagagtgtccaaggaagatggctagtgaggcaggcagagcgggactgcatagtccttcctggggagacatggggttggggtgaggggctaggtaatggattgatgtaacaatttaatgttgactttaaattttataagaagaataactttattttattttactcttatcgatttacgagtctccttaaatagtaaagatactgggtttcttctattactttttcagctttttccccctttctcttctctaggcggctaggggtggagatgggcaaagtgcaggtttaccaggaacctaacagaggtgagctatcttgggcatgtggaacattgacctttttgtgaaatgtggcatattggctccgtccttcatcctttactattgaaacgatttgattcagttgtacatttccattagcaagaagtcaggcaggcaaggtagaacagagtggttttttagctctcactaataccagctagatatctaaccctggtgcaagtcatttctggggcttgaactgcagttctgagacttcattcagtaaaagctgcagacatatttgaaccagctggtcaactgaatgaacatgagctcaactgttgcttaaatttatgtcaccttaggaaggatgagtaaatcctgtcaccttagacaggatgactaaatcctgtgtgaccgcagttttagttagtctttatttgcacctaagctgccttgggttagacttcataaaatattgttaagaaatactttttgctaattgatacatgtcattacataattctcccaagttgtaaaaagaagtgttatttaacctttgtaggtccaggtgtgctggctcatgcatctaatgccagcactttgggaggctgaggcaggcagattccttgagctcaggagttgagaccagcctgggcaacacggcaaaaccctgtctctactaaaaatacaaaaattagccaggagtggtggtttgcacttgtagtcccagctactagggaggctgaggtggaaggatcgcttgagcccaggaggtggaggctgcagtgaagtgtgatcataccacagagtgagaccctgtctcaaaaataaataaataaataaatagaaagtgatctttgtaatttctttagcaatggtggatatttgaaattattttaggccaggcgtggtggctcacgcctgtaatcccagcactttgggaggccgaggtgggcggatcacctgaggtcaggagttcgtagaccagcctggccaacatgatgaaaccctgtctctactaaaaatacaaaaatttgctgggcttggtggcaggcgcctataatcccagctcctgggaaggctgaggcaggagaatcgcttgaacccgggcggtggaggttgcagtgagccaagattgtgccattgcactccagcctgggggggaacaagagcgagactttgtctcaggggaaaaaaaaaaaaaaagaaattattttagcaggagcgatggacagcttgcatgggcttgagagttacacaccttatccttgacaagttatttaacctttctaaactataaataaactgtaaattagggctgttttgaggattaagtgggataacttgtgtgcctaccagtttttggcacacagtaggtgctcaatatatacttattcctgttccttttccactagaagatttaaaaaaacattttttttttttttggtagaacaagggtctcattatgttgcccaggcttatctcaaactctgggcaaaagcagttctcctatttcagccccccaaagtgctaggattacaggtgtgagccaccaggcctggcccctctacaggattttatcaaatatttacatattataaagcctacaggaggctttgataaaaaggcacaagttttgctgttcccatgtttatctccgttcctgcctcttttctgtctcccaagatccctatgtggcgtcagtagggaaaaagtataattaaactctgcaaggagagtttggagaagattcttcctctagaggggattgaatgatgttctttgtctggagtctaggagggaaggtgaaagggagaagcagtggcataagactccaggagactggtccactctccaagtttctgaataaagggagagaaaatacttggtgtttattgggaaggaaggaagtaatatttgtgaatttcttactgttaccagatactgaaaaactgagttcaggagttcagggattgatgttaggtacgaggtccagtttgaatccagatctccctgactctaaagctcattttcttttcttttcttttcttttttttttttttgagacagggtctttctgtgtcactcaggctggggtgtagtggcatgatcagggctcactgcagcctctgcctcctgggctcatgtgcttctcccaccttagcctccccagtagctggtactacaggtgggcaccatgctgccaggctattttttttttttttttaaatatggagtcttgctctgtcacccaggctggagtgcagtggggcaacctcggctcactgccacctccgcctcccaggttcgagtgattctcgtgcctcagcctcccaaagtgctgggattacaggtgtgagctacacacacacacccagccataatttttttttttttttgatacggggctttgccatcttgctcaggctggtaaagctcattttcttaacatcataccacatttcttttgtaaacttgtattctgttttttccaacatttttttttttctcttatcctcacaatctgttcccattttgctactttttttttgtgtgtgtgtgtgtgtgtgtgtgagacagagtcttgctccattgcccaggctggagtacagtggcgcaatcttggctcactgcaacatccgcctctcaggttcaagcgatactcctgcctcagcctcccaaataggtgggcttacaggtgtgtgccagcacgcccggctaattttttgtgttgttggtggagacgggctttcaccatgttggccaggttggtctcaaacttctgacctcaaatgatcatccacctcagcctcccaaactattttcctacatttttaatgaaaatgttcaaacatataaaaaagttgaaagaatagtacagtgaactaccgcctagcttgaacagttaacattttgccatatgaatatgtatgtggcgaaccatttgaaattaagtgcaggccgggtgcggtggctcactcctgtaatcccagcacgttgggatgctgagctgggtgaatctcttcagcctgggaggtcaagactgcagtgagccatatttgcaccactgtaccacagcctaggcaacagggcgagatgtgtcccaaaaaaagaaaaaaaatgtaagttgcagacagttaatccttgaatacttgaccatgcatcctctaggaataattactttcacctaaataaatatgataccattatcacatttaaagaaattaactacaggcagggcatggtggctcacacctgtaatcccagcactttgtgggggtcaaggtgggtggatcacttgagaccagaagtttgagaccaacctgggcaacatggcaaaaccccatctttaccaaagataaagaaattagccagggttggtggcacacagctgtaatcctagctacttgggaggctgaggcaggaagatcacttgagtccgggaggtggaggttgcagtgagctgggatcacgccgctgcactccagcccgggcaacagagcaagaccttgtctcaaaaaaaaaaaaaaaagaaaaggaaaagaaaattaacttaacaattaaggacaattctttttttttctgtggcctcaagtgatctgcccgccttggcctcccaaagtgctgggattacaggtgtgagacaccgcacccagcccaacaacaattctttaatcatctaatatatggcctatattcacatttccctaattgtcctaaagggtcttttattttttatttttttgagatggaatctggctttgtcacccaggctggagtgcagtggtgcgatcttggcttactgcaacctctgcctcccaggttcaagcagttctcctgcctcagcctcctgagtagctgggattataggtgtgtgccaccaagcccagctaatgtttgtatttttagtagagacgaggtttcaccatgttggccaggctagccttaaacacctaacctcagattatccgcctgcctgggcctcccaaagttctggtattacatgtgtgagccaccgtgcccagcctaaagggtcttttatagttgttttttccaacacctccaccccaaaccaggattcttagttcaagggattttttttaaaaaatatctctttagtctcttctattttagaacaatcccctcacctcttccgttttcttcctgtgacagtgaagaggttgtcttgtagaatgtcccattatggatttgtctaattgtttctttatgactgatcacacatattttgagagtagggatattaggtcttatttatctttgtttctcacaacatacaatgttttgtacctaatacattctgaattgataattgatgctgattgaatgagtatataattttcttttttttttttttttttttttttgagacggagtttcgctcttgttgcccaggctggagtgcaatggcacaatctcggctcaccgcaacctccgcctcctgggttcaagcgattctcctgcctcagcctcccgagtagctaggattataggcatgcaccaccacgcctggctaattttgtatttttagtagagacggggtttctctatgttggtcaggctggtctcgaactcctaacctcaggtgatttgcccgccttggcctcccaaagtgctgggattacaggcatgagccactgtgcctggcctatgattgtctataaagatactgtgctcaggctgggcacggtagctcacacctgtaatcccagtactttgggaggctgaggcaggcagatcgcgaggtcaggagatcgagaccatcctggctaacatggtgaaaccctgtctctactaaaaaaatacaaaacagttagctggatgtggtggcgggcgcctgtagttccagccactcgggaggctgaggcaggagaatggcatgaacccaggaggcagagcttgcagtgagccaagatcgcaccactgcattccagcgtgggcgacagagcaagactccgtctcaaaaaaaaaaaaaaaaaagttaccatgctcggagtggtacagcactcaactgtttgtatatataaggggtgagaattatacatttacttatttcaagtcagaaatgtaattctctcttaaagctgtgttttaaaaagtgattaatggcagtatgtgtattatcccttgtaacatctaaagcctactgagtcttataacagtttgagttgccatattctattacattagggaataatacagatttttttgtgtattttgaaaaatttgaactatatgcctttccctctcttctttttccttttcctgccagaaacaagagtacaaattcaagagtctgtgaggggaaaagatgttttcatcatccaaactgtttcgaagtgagtatccagcaaaagtgttgctttctgggtttcagtttaggcatgagtgtttaaaataatgatagatggctagccaggaagagttataatagtcttaaaattagtatatcttaccaatttagaatttagaaaactaagttttctgacataactgctgacttttacatgttctttcagtgtttttccttctttctttctttttttttttgagacaaagtcccactccttcacccaggctggagtgcagtggtgcaatctcagctcactgtaaccacctcctcccaggttctagtgattctcttgcctcagcctcccgagtagctggtactacagttggcgccaccacgcctggctaatttttgtatttttagtagagacggggtttcaccatgttggccagactggtcttgaactcctgacctcacgcaatctgcccgcctcggcctaccaaagtggtgggattacaggtatgagccaccgtgtccagccactcagtgttcttaacgggtggaaataaccaagtattggagtagaggctctttttttttttttttttttgagacagaatttcactcttgttgcccaggctggagtgcaatgacgcgatctcggcttaccgcaacctcagcttaccgcaacctctgcttcccaggttcaagcaattctgcctcagcctcctgagcagctgggattataggcatgtgtcaccacgcccggttaattttgtgtttctagtagagacagggtttctccatgttggtcaggctggtcttgaactcccgacctcaggtgatccacctgcctcagcctcccaaagtgctgggattacaggcgtgagccactgcgcccagcctggagtagaggctgttaatgataatagtatacattaagtttcctaacaattaacagccagaattttgtaaaacttgcaaggaagcatttctagttccctcctctccccaaaagaaacagaggctaggggaggagacctttcttagttggggttctttaagcttttattgcatataaaagtgatcattatttactgttttattacataaattagctgagaggataaaaaactgtactgaaggaatgtgtattcctgtctggtgtgacctttgacacacctgtgttctggaaattgtttggtcacatatgtttaagctaggtatagaagattcaatgcagcaaggctgtctctggcactctggaagggagggtgatcacctggagccctactttttttttttctttttcttttttctaagaggtagagtcttgctctgttgtccagtctggagtgcagtggtgagatcataactcactacaacttcaaactcctgggctcaaactatcctcctccctcagcctcccaagtagctgggactacaggcatgcaccagcatgctcacctcgttttttcattttttgtagagatggaggtctcactgtattgcccagctggtctcaaacttttggcctcaagtgatcctcctgccttgacctcctatattgctgagattccagcaatatagaaggtgagcctatcacacctggccttaaagccccactttccattgtgtgtttgtccacaaatgtccctaaatgcttctgtgtatgaagttcttcgctcagaacaatttttaatgtctagaaatcagtttgtctagtgcattattttttagcttagagagtctgaaagttgctgcatgcttaatttgtgtatatacatatataaaaccaacgaaagggaaaaagaaggccatttcgggagactttagtcttggaacacacatttttttcacctaaattttgaacattttctctcctggtctttggtttattgggatgaagtcacaaaacccccatctctcctgggaagaggagtggcaggggagacctgtccttgcatcctatagccctggcaaacgggtgtgctctgaaggaggaagggtgtggagggcctttgccacggtgccctagcttcaccttctgctgtgacacccaggattctcagcagagctggaggtgggggcacggagcgccaactgcccctgctgctgctgtcctctttcccctttcccacgtctgccaccaaaccagggtggaagtggaggactcacctgtgcccacatcttaaccctttacctccagcatcggggtagggaaggggcgggcacagaacaacttaaacggcttctggctccttggtttctgtgtctgtggtacttttatgtccttacagacaagtgtgattccattggataaatgcacagaggttgtgtggattacccaaggggatgggtaggcattgagggcacccctggacttagaatttaggacttcagaagggtgactgctgatccttctcattttcaagtccttctggttgtttatttttgtacatttcaatacttatcctgtgcccctgtcttttgtcagtttcatattcctctaatcagaatcactcagcacccctttcattttctctccgtgtctcattttgcattgttccatacctgacataagcttgtgttaactcgggttctcagtcttgtccatgttgcagagtctggacgtcatggtcttctttgtgaaataccatgaaataacatttagtgttgagggccagatgtggtggctcatgcctgtaatcctagcactttgggaggtcgaggtgggcatatcagttgaggccaggagtttgagaccagccaggccaacacggtgaaaccctgtctttactaaaaatacaaaaaattagctgggcatggtcatgagcgcctgtagtcccagctactcaggtggctgaggcacgagaattgcttgaacgcaggaggcagaggttgtagtgagctgagatcacgccactggattccagcctgggtaaaagaacaaggctccatctcgaagtaaaaaaaaaaaaggctgggcgaggtggcttacacctataatcccagagctttgggaggccgaggcgggcagatcaggagttcaagaccagcctggccaacatggtgaaaccctgtctctactgaaaatacaaaaattagctgggcgtggtgatatgcgcttctaattccagctacttgggaggctgaggcatgagaatcgcttgaacccaggagacagagggtgcagtgagccaagatggcgccactatactccaggctgggtgatagagtgagactctgtctcaaaaaaaaaaaaaaaaagcctgtaatcccaccactttgggaggccccaggcgtgcagatcacctgaggtcgggagttcaagaccagcctgaccaacatggagaaacgctctctctgctaaaaatgcaaaattagccgggcatggtggcgcatgcctgtgatctcagctactcgggaggctgagacaggagaattgcttgatcctgggaggcggaggttgcggtgagccgagatcatgccattgcactccagcctgggcaacaagagcagaactccgtctcaaaaacaaacaaacaaaaaaatgatttagtgttgtcagatacatcttatacttcattttactacagattagtgctagcactaaaaataaaagagaaatttaaaattaagaaaattccatccattaactgaagttttcctgtatttcaaacaagactgtccttatctgagttcagtaatggaaagccttgttcctccactcttatccttcccatagaatacttttctgaaaatctttttttttcctaagttaattaacagggtgaaagtctcttttaactcatcagatgtcagacttgttgtatagtgacagagaacctactcacctgaatgttctgtgtttccattcactccttctttcattaacaaatacttattttgaatgtctacaatatgtgaattacagttagttacacgtatgcaggatgcctccatgattaaaacagagaaagtccttgtccttgtggagtttatattccagtggaggaagacataaagtgagcataataaagacatagattatctagaaggtgatgaatggtttggaaaaaaataagacagcatggtgagatgatagtggtgagagggcagagagaggcagacagggtaggcctcattgtggaggtgacatttgaacagagactagagaaggtgagggagagtcaggtgactaggtggggagaaaagcattgcaggcagtgggaacgcctagagcaagccccttagcggtgtgagctgctgtgggaggactgaacagggtcaggtgtggccaggcaggaggggaggggcagatcctcaagtttggactggagttgtaaatttgagagttgccaccatctatgaagctgtgaaattagatgagaagcccaaaggacgagagggaacagaaagagaggacacatgagcaagtcctgggacgtgaggctggggagaagaggaaccagcaaaagaaaccaagggtggaaggaggacaccagagaggggcattctggaagccaagtgaccgtggacatggccgcatggaggccactgatgacctttatgaaaacaaagcttcactggactatttgggagagactgagagtagataaattggagatagtgtaagatgtacagcaaaggggagcagaggggagagtggttatgagtcgtgttaatggaagtaacagaatgtttgtggccgatgggttatcagtggtggaggcaggagaggagagagaattccttacataggtgtgccatttggagggattaattttagggccactggcatggaaatttcctctgactgatgactgagggcaggccgactcctggggcacagatgcacatagtgggagcttgtggacacgctcctctgagagtacttaagtagggtggtcagttgagagcagatgatgggggatcttatggaggcctgagaaaagaggaatttattggttggtttttttctgccttgcaccttaggttgtataaaggcatgagtaacacactgctgacactttttggaacagggaatactgtgttgtagatcccttgatgagatttgctgtgtctttgttacagggacgtgaacaccaccatcatggagctcctgatcatggtgtatgcatgtaagacctcttgtgccaagagcatcattggcgtgataccctactttccttacagcaagcagtgcaagatgagaaaaagaggctccattgtctctaaattgctggcttccatgatgtgcaaagctggtaagaatggcagatgtttcacaattaattgggggcctgggagttttatttatttattctctcttttttaagacagggtcttgccctgtcacctaggctggagtgtagtggcgtgatcatagctcactgcaacttgaactcctacagtcaagcagtccaccagagcctcccaagtagctaggactataggcacataccaccctgcctgctaatttttaaattttttgtagatactgggtcttactatgttgttcaggctggttttgaactgctggcctcaagggatgtttctgctccagcctcccagggtgctgagattatagtcatgaaccaccataccctgctggagttttatttttaccttagaaatatcaaagtaatggctgggcacagcagctcacgcctgcaatcccaatgctttgggaagctatgtgggatgatctttgaactcctgggctcaagtgatccccctgagtagttggaactatggacatataccaccgtgcctgcctagataggcatatattggaaaagatacatattattctgtgtcaggcattttcaggtaacaacctaagtatttttcctgtgtttctaaataaccttcatagttgttattgggtatttgtgtcaatatatttgtgtttgtgtgtgtgcgcgcttgtataagtgtatatgattttatttatttatttatttattttgagatggagtttcgctcctgttgcccaggctggagtgcaatggcatgatcttcgctcaccacaacctccacctccccggttcaagcgattctcctgcctcagcctcccaagtagctgggattacaggcatgcgccaccacgcccggctaattttgtatttttagtagagacagggtttctccatgttggtcaggctggtctcaaactcccgaccccgcctcagactcccaaagtgctgggattacaggcgtaagccactgcacccggcctatgatttttttattttaatttttattctgtttatttattttttgagacggagtcttgctccgttgcccaggctggagtgcagtggtggcacctcggctcactgcaaccactgtctcctgggttcaagcgatttttgtaccttagcttctctagtagctgggactacaggtgcctgccaccacactcagctaatttttgtatttttagtagagatggggttttgccatgttggccaggctggtctcgaactcctgacctcaagtgatccacctgctttgggctcctaaaattctgggattacagacacaagccaccatagccagcctgaatgtatatgattttagaaggtatgtatcacggagcatttgcacagagtgaatagaataaaagtccccatatcactgcattttaagacaggtacttactgtagaataaacctttttttttgtttgttttttgagacggagtcttgctctgttgcccagtctggagtgcaatgacgtgatcttggctcactgcaacctccaccacccgggttcaagcaattctcctgcctcagcccccagagtagctgggattgcaggcacacaccaacatgcccaactaattattattatttttattttttatttttgagtctcacctgtcatccaggctggagtgcagtagcgtgatctcggctcaccgcaacctccacttcctgggtttaagcgattcacctgcctcagcctcctgagtagctgggattactggcgcccaccaccacgcctggctaatttttgtatttttagtagagacgaggtttcaccatgttggccatgcttgtctcgaactcttgacctcaggtgatccaccttcctcagcctcccaaagtgttgggattacaggcgtgagccaccacgcccagcccagaataaactttctaagatagtttttcagtaaaggcaaacgtaaaacaaacatttaaaaactaggcagggtgtggtggctcacgcctgtaatcccagcactttgggagaaccagggggcgatcacctgaggttgggagttcagagcagcctaaccaacatggaaaaaccccgtctctactaacaatacaaaattagccgggtgtggtgacacatgcctgtaatcccagctactcgggagtctgaggcaggagaattgcttgaacccgggaggtggaggttgtggtgaaccaagatcatgccgttgcactccagcctgggcaacaagagcaaaactccgtctcaaaaaaataaaaataaaattaaaaactcaacccgaagcaacctcaggagcctaccccattgtaaacactatgacaggcagctggtgaggagagcaggcttgcctgctgaatcttcaggaaagggcccatcttctctaccagccttgcttgatgggcctccagacttactttcctgttcttttgggcaagtaatgctttaaacaatttttcatactgaattttccttacacttttctggtgatcgttacaaaggtggtgaaggttttctgttttctccaatttccaggctggtgcagtttgtcttgatatctttttttttccccatgggtctcagtcctcttgcccgggctggggtgcagtggtgtgatcactgctcactaccaggaggtagccttgacctcctgggttcaagtgatcctccgaccttagcttccagagtaactagggactacaggcatgcatcaccatacctgactagttttttgtatttttagtagaaatggagtctcaccatgtggcccaggccattttcaaacacctgggctcaagtgatactcctgcctcggcctcccaaagtgctgggtttacaggcatgagccaccacacccggctgacttgttatcttaagactggactttgccatgcctgttaaacttcaagaagatttgatctgctctaatataatttttaaagactcttctgtattactgttatctttgctatattatgactattttttatttatttattttttcgagatggagtctcgctctgtcgcccaggctggagtgcagtggcatgatctcagctcactgcaacctccacctcctggattcaagtgattctcctgcctcagcctccctagaagctgagattacaggcacatgccaccacacttggctaatttttgtatttttagtagagacggggtttcaccgtgttggccaggctggtcttgaactcctgacctcaggtgatccgcctgcctcagccttccaaagtgctgggattacagctgtgagccatcgcacctgaccaagactttaaattgatgtgaaaatcaggcatctcacagtactaaaaaaaaaaaaattttttttgaaaaatacaagtgctgagtttttttgatggtagaacaattttgtctttttttttttgagaccaagtctccccctttcacccaggtcggagtgaagtggtgcgatctcggctcactgcaacctccgcccccccaggttcaagcgaattctcctgcctcagcctcccgagtagctgggattatgggcacgtgccaccatgcctggctaatttttgtgtttttagtagagatgaggtttcgccatgttggccaggctggtctccaactcctgacctcaggtgatccacccgcctcggcctcccaaagtgctgggattacaggcgtgagccaccgtgtccggccttattttttatttttttgaggcaagatctcactctgtcacccagactggaatgcagtggctcaatctcagctcacttgcagccttgaccttctgcactgaagcgattctcccaccttagcctcctgagtatctgggactacagatgtgcgccaccatgcctggctaatttttgttttgtagaggcggggttttgccatgttccccaggctgatctcaaactcctgagctcaagcagtttgtcagccttggccttcaaagtgctaggattacaggcgtgagccactgtgcccggccatgagagcaattttttttttttttttgagacggagtcttgctctgtcacccaggctggagtgcagtggcatgatcttggctcactgcaacctctgcctcccggattcaagctattcttctgcctcagcctcccaagtagctgggactacaggcacacgccaccacgcccagctaatttttgtatttttagtaaagatggggtttcatcatattggtcaggctggcgttgaactcctgaccttgtgatccacccacctcgccctcccaaagtgctgggattacaggcgtgagccacagtgcccggctggagagcaattttttaatagtaacttattgtatatagtattttatgtagtacctattttatacagtgcaacttgtttttaaactgtttataggctgggtgcagtggctcatgcctgtattcccagcactttgggaggctgaggcaggaggattacttgaggtcaggagttcgagaccaacctggccaatatgatgaaaccccttctctactaaaaatacagaattatctgggcgtggtggcatgcacctgtattcccagctactttcaaggctgaggtgagaggattgcttcagcctaggagttcaaggctgcagttagctatggtcatgccactgcactccagcctgggtgacagaatgggatcccatcttaaaaaaaaaaaacaaaaacaaaactatttattgcttgtgtctgctttattttcaaaggtctaactcatcttattactatggatttacaccagaaggaaattcagggcttcttcaatattcctgttgacaatttaagagcatctcccttcttattacagtatattcaagaagaggtgagctagctcaaacttttttattttaacattctgattaaggttgaaagatgtatttccatttccttaggatacccctaaaggattaaaacttgatgtattgtacttaaagtaccattatactttatagctataatccaacgcattttagaattctgaatctgcagtttgtttctttagataagctcttaaaattgctttttcttttggacctcaagtacctagaattggactagatatgattgtaatgagtaatttactctcattactagtctatgcttgatcctggttctgttttatgtatccatctatccatcctgtctctctgtccatccagttataatagccagcatccatgatcccacctcccagcaagaaaactagagtcatcatcataacttagagctgctcatgggctccttctctgtcctatccccctgcctccttccaccctagggaaccactgtcctgaagcggtgctgaatctgtcagatgctttttctgtatcagtggagatgatcattttttttccttcattctgttaatgtggtttattaccacccttgaatcctgggataaatcagatgtttaattttaatatagctacatttgtttttctttgatatgagttagcatttttgtgacttactatttaagaaagcttttaaaatgttaatttatactgtacttagctattttgcttttagctgtttttctttctttttttttttttttggtggggggtgtgatggagtcactcccaggctggagtgtaatggcgcaatctcagcccactgaaacctccacctcccgggttcaagcaattctcgagtagctgggattacaggcatgcgccaacacagctggctaattttttgtatctttagtagagatggggtttcaccatgttggccaggctgatctcgaacgctgacctcgtgatctgcctgcctcggcctcccaaagtgctgggattacaggcatgagccaccgcacctggccttagcggtttttcttatataaattatttctctctttaataacttttctagataacttctttttacagtactgtatttaaaagaagataacttctttttacagtactgtatttaaaagatggcagtttataggtttctgaggaacttctttctggtaagaatacagggcttccccattctccagcaattgttataagtccttatagagaaaatgaatttaagtatttttgaaagagaaaaatgtaaaatattctgctttttttttttctttaaagttacacacaagaaacataaaaactctacgccaggcgcagtggctcacgcctataatcccagcactttgggagtctgaggcgggtggatcacttgaggtcaggagttcagaccagcctagccaacatggtgaaaccccatctctactaaaaatacataattagctggatgtggtggcgcgtgcctgtaatcccagttacttgggaggctgaggcaggagaattgcttgaacctgggaggtggaggttacagtgagccaggattgtgccacggcactcctgcctgggtgacagagcgagactatctcaaaaaaacaaaaaagaaaacaaaaatactctaacaaattaaaaaaataatagagactttaattttacctgaaaaattttatgttttttttttgagacagggtctttctctgtcacccaggttggagtgctgtagtgccatgatagctcactgcaaccttgaactcctgggctcaagagatttctcccacctcagccttctgagtagctgagactagaggtgtgccaccacacctagctaatttttaaaaaatatttccagagtcagaatcttgctgtgttacccaggctggtctcaaactcctggcctcaagcgatcctcctgcctcagcctcccaaaacagtgtgattacaggtgtgagccactgtgcctggcctaattttacctgaatattattcttagttgagagagaaggtgagataaaattggcaaatgtcttgatagggaaggatgaagaggtttaggcagagagagagtgagagggtgagcattgaacgtggttcagttagcaaccagccgcatggagaaacctgtcattttggaagaaatagagcagtcgctatagacttatgtgggttgctgtcgacatcttgttgttttaggggatgtttccattcaggacacaggcatgttgtgtgccaatgtctcaaggcacaaatggcaattgcacctcttaagggatgcccggtgggtgagcctaaagaacgaaggctggggcacccttgtgctggttgcaaggtcaggctggaagcctaacgctagtcattgcctgtagtgcaggcttctacctgaggatgacactgccttctacttgaaaaaatccccattttagtttcattgttgagaagaagtcagggctgagtgtggtggcccacacctataatcccagcactttgagaggctgaggaggttggatcagttgagtccaggagtttaagaccatcctcggcaatatggcaaaaccctgtctctacaaaaaatataaaaattaaccaggtgtggtggtgcattcctgtggtcccccctactcaagaggatgagaagtgggaggattgcttgagcctgggaggttgaagttgcccaggtggtcgaggctgcatcaagccgtgatctgggcgacagagtgagattccttctcacaaaaaaaaaaaaaaaaaaaaaaaaaattaatatgtgggaactcagtgttaaaaaggaatttttgtgtattgcttttttcttttttttggagacagtctctctctgtcactcaggctggagtgcgattttggcttactgcagcctccgcctcctgggttcaagcaagcatatctggctaatttttgttttttgtttttttttgagatggagtttcgctcttgttgcccaggctggagtgcaatggcatgatctcggctcacagcaacctccccctcccaggttcaagtgattgtcctgcctcagcctcccgagtagctggggttacaggcatgtgccaccacacccggctaattttgtatttttagtagagacagggtttctccttgttggtcaggctggtctcgaactcctgacctcaggtgatctgcccaccttggcctcccaaagtgctgggattacaggtgtgaaccaccgcacttggcctaatttttgtgtttttagtagagatagggtttcaccgtgttggccaggctggtcttgaacttctgaactccagtgatctgcctgcctcagcttcccaaagtcctggtattacaggcatgagctactacacctggcctgtattgcctttttatagtatacgtatcttgtctcttttgttttcgtgtgttagagcctcttaaagcaggggatagatattcatgtttcactgaatctaaggtgctgtcagtccaggcttacattattttacgtcaccaagaaagaagaaaacactgctaattatactgtggcactgtgccttcttgtcacttagtgatcctattctgcaggttttgatgctgacgctttctccatctcttgtgtttgtcactggaatttaagcaccttctgccagagtcagaaggaacattctggtactaggatgctcgttgccttgaaatttttgccatctatacttttttttttttttgagacggagtctcactctgtcgcccaggctggagtgcagtggcgcaatctcagcttactgcaagctccgcctcccgggttcacgccattctcctaggcctcagcctccccagtagctgggactacaggcacctaccaccacgcctggctaatttttttgtagttttagtagagatggggtttcaccgtgttaaccaggatggtctcaatctcctgacctaatgatctgcccgcctcagcctcccaaagtgctgggattacaggtgtgagccaccgcgcccagccaacttttgccatctcttctgagggcgtctgacagtgtctgttgccttccgctgcactgctggggatgtgtcaggcagtccttttcacagtttgacctactggtagggatcttcctttcttaagtttcataaagcatttgattgttgccttgcaagaaaatgtggaattgtatcatttttccagtgatgaatatttgattcatgaatatcaaattatactctgatggtctcttcctgtgtctttctgcatacatgataatttttcttttcttcttttttttttttttttttttttttgagacggagttttgctcttgttgcccaggctggagtgcagtggcgcaatctcagctcatcacaacctccgcctcccaggttcaagcgattctcctgcctcagcctcccgagtagctgggattacaggcatgggcccccatacctggctaattttgtatttttagtagaaagggggttttccatgttggtcaggctggtcttgaactcccaaactcaggttatccacccgcctcaacctcccagagtactgggattacaagcgtgaagccaccgtgcccggcttgataatttttcattttaatgaaaaattttaatgaaaagaatcatagtaattctttctggagacattttaaatgggttcaaacaattctcctgggttcaaacaattctccggcctcaacctcctgagtaactggattacaggtgtgcaccaccacgcctggctaattttgttttgcatttttagcagcgagggggtttcaccatgctggccaggctggtcttggctcagatgttctgcccaccttggcctcccaaagtgctgggattatgggcatgagccaccgtgcctggccatctttgggaattttttttaatctgttaagtatttcatcccttctatttcttttattattttcctttgggaactattaggtcctgaaaattttggatctagtctctataacttttaaaaacttattttactttttgcatacttatatatagcattctggggaaattccttgtcttgatcttccctggtttgttcttaaagttgtgtttattctgctgttaagccagccagctactgggtttctttagaccataataacttcttccccctagatttatttttggttctttttcataataacttgttctttcttttttttttttttaatttatttttttattgataattcttgggtgtttctcacagagggggatttggcagggtcatgggacaatagtggagggaaggtcagcagataaacaagtgaacaaaggtctctggttttcctaggcagaggaccctgcggccttccgcagtgtttgtgtccctgattacttgagattagggattggtgatgactcttaacgagcatgctgccttcaagtatctgtttaacaaagcacatcttgcaccgcccttaatccatttaaccctgagtggacacagcacatgtttcagagagcacagggttgggggtaaggtcacagatcaacaggatcccaaggcagaggaatttttcttagtgcagaacaaaatgaaaagtctcccatgtctacttctttctacacagacacggcaaccatccgatttctcaatcttttccccacctttcccgcctttctattccacaaagccgccattgtcatcctggcccgttctcaatgagctgttgggcacacctcccagacggggtggtggccgggcagaggggctcctcacttcccagtaggggcggccgggcagaggcgcccctcacctcctgggcggggcggctggccgggcggggggctgacccccccacctccctcccggacggggcggctggccggtcggggggctgaccccccacctccctcccggacggggcggctggccaggcagaggggctcctcacttcccagtaggggcggccgggcagaggcgcccctcacctcccggacggggcggctggccgggcaggggggctgaccccccccacctccctcccggacggggcggctggccgggcaggggggctgaccccccccacctccctcccggacggggcggctggccgggcggggggctgacccccccacctccctcgcggacggggcggctggccgggcagaggggctcctcacttcccagtaggggtggccgggcagaggcgcccctcacctcaacttgttctttcttgttgtatataatttcccattttaacctccgtagagacaatagacttgtttttgttagagtcctttcttttaggtcctttaattgttattaactgttttcttggttctgtcttttcttggctgggtttggtaatgtttgatgatgtttgatgagacaaggaaatacatgaaaaagtttagaaagactgccagcaaaaataatgaaagtgcccaaatggaaatatattttactgccttacttcctgagagtgttggataaattaggctttcctgtagatacagctgagccatgtgattatgccggaggcaactgtactaaattattcaaattaatcattttttgttcatttgctaagtagttattatttagtgcttgttgtatggtaggcattgttttatacatgttgctaggtgttattaactgctcatattaaaattcattggtgtaattgtgagaaaaaagcaatgagaatatagttaatatatttttttaaaatagtgctgggccgattatcctttaacaaattggttgcttcaacatgttatgactgcgatatgttaaatagccatttgtttggactgcagtaatttggaatttgacagtcagcttgtattcagattgaattggatatccttgtactttgaaattacatgtaattaggattcttgttgacgagatatatagaaacatctttacactgcatcattagtatttgctggcagagataagagctaatcaccaattatccctacttttttcctaaaagaagtctgtgtggctcacaagttagtaatattttttcataggcaggttcctttcttcattttccaaaggagaattttactttgaactttttctttttttggaaaactttcaactagccaagcatttttgggtctgttggaattttcctttttgttgacatgcagtaatacctgacttcttgtctgtcacagatcccagattacaggaatgcagtaatcgtggccaagtctccagcctcggcgaagaggtaggtgggaatctcacaacctctttctggatctacttctaaggattgtatccgtgatgagttccaggcattctaatttgaacttcagtggttcccagcgatatctcttatttttcttccatggactggtattttaagattgttctgtcaactccatttattaagtaaacattttaatttcctctcttttttttccaatcccactctatgattgccagacatacttccttttttaagttatcttccacttacactttcttttatttttattattattattatttattttattttatttctttattttttgagatggagtttcgctcttgttgcccaagctggagtgcagtggcgcgatctcggctcaccacaacctccacctcctgggttcaagcgattctcctgcctcagcctcccaagtagctgggattacaggcgtgcaccaccatgcctggctaatttttgtatttttagtagagatgaagtttcaccatgttggtcaggctggtctcaaactcctgacttcaggtgatccacctgccttggcctcccaaggtgctgggattacaggcgtgagccaccacactgggccttatttttatttttaatagtagaaacagagttttgccatgttgtccaggcaggtcttgaactactgaggctcaaacgatccacccacccgccttaccctcccaaagtgctgggattacaggcatgagccactgcgcctgacctcaatcatatttcttgaccaaagcaatccagttctggggaatacgatctagtgttttccccagacccagattgacaatcacatgtcagtctttgagtctggcgtttacagtactggcgaatatttacagtactagcagacaacttcatagttgtttactgccccttatttgaggaactcagaaattgattaacagaattttatccagctgagaggccagttatttgtatatgttaaaggtgacattttacaaaattgacacaacctgaggtgtaccaaagggggagccttgagagtcagtagagtgagttacatgtaacctggagtaactgatgtgtcactattgcatacttaaaattatatgtcggttgagaggatttcttatactaccagtgttttgtggagaagccactccactggagagggaaagaacaaaatcacttgtaggaataaagcctttttcctaaaaaagcccttttaaagttattttccagttgaatacctttgatcactggattgttgttgagtcctgtggaatgaaagaaagtgtagggtgcctccaccctgggctcgtgggctggcagtattgaaggatggaggagaacttgcacacagtaagccattgatttcaaaagtatttcacataagtcattgacgttatgaattaagaatagcactttaatatgtagacttagtatattaaataaaataaattggcatttgagataaaaccattacatggctgtgttcttgtggctgactttcccaacccagccgggcctgtgttcacccatgtgtccttcaagaagttgtatcacctgatctcctcttgtccatttgattaaattgtaagaaacagactgaattttagaatgtaaacatttcaaatagcttttccaaacatttcttcaaaggctgaattaattttacttaataatttttctctgatatacatgctttaaaaaaatgtaggtgaaaaatcacataatatacaataattttaaagtatagaattcactggcatttagtgcattcacaatgttgtgtaaccaccacctgtctctgttttcagaacattttcgtcttcccagaagaacatctagtacccattcagcaatcattccttatcccttcaccttctgtccctcggcagccacacagtatgtggccctctgtgtctggtttctttcacttagcagttttcaaggttcatctatggtgtagcatgtagtatctcagtgttttgttgtcgctgttattgttcgagacaaaatcttactctgttgccgaggctggagtgcagtggcacgatctcagctcactgcaacctccgcctcctgggttcaagcaattctcctgcctcatcctcccaggtagctggaattacaggtgcatgctaccacacctgggtaatttttgtatttctggtagagatgaggtttcaccatgttggtcaggctggtcttaaactcctgaccttgtgatctgcctgcctcggcctcccaaagtgctgggattacaggcgtgagccaccgcacttggccagtacctcagtccttttgatggctgagtaatattgcattgtatgtgtatactagtttgtttatccattcatctgttgatggacactttttttttttaccgtttggctattatgaataggactcctatggtcagtcatggattagtttttgtgttggcataagttttcatttttcctttcttgtggatatatattaggattggaattgctgggtcatatggcagtttcgtttatgttttgaggaactatcagtctcttttccactgcagctgcccattttacattcccaccagcagagtatgagggttccaacttctccacatcttcaccaacacttaattctctgagttttttcattataatcatcctagtgggtgtgaaattctaccttatcgtggttttcatttgcatttccctaatgattgatgatgttgagtatcttttttttttttttaatgagacagggtctcagtatgttgctcaggctgggctcaaactcttgggctcaatcaatccttctgcctcagcctgttgagtgtgtgtgtgtgtgtgtgtgtgtgtgtgtgtgtgtgtgtatttatttatttatttatttttttgagacagagtctcgctctgtcacccaggctggagtgcagtggcgcgatctcggctcactgcaacctccgcctcccaggtttaagcgattctcctgcctcagcctcctgagtagctgggattacaggcatgcgccaccatgcctagctgttgagtatatttttatgtgctttttggccatttgtatatatttggagaaatgcctgttcacaccctttgcccatttaataattgggttgtctttttgttgagttataagcactctttatatattctacatactaaaccttgttagatacatgatttgcagatattttctctctttctgcagattgtcttttcactgtcttgatggtgttctttcacacaaaaaggtttcaatgctgataaagttcaatttatctttttttttttttttttttgagacggagtctcagtctgttgcccaggcttgagtgcagtgtctcagctcactgcaacctctgcctcccgggtacaagcgagtctcctgcctcagcctcctgagtagctgggattacaggtgcccgccaccacacccggctaattttttgtattttttagtagagatggagtttcaccatgttggccaggctggtctcgaactcttgacctcgtgatccgcctgccttggcctccccaatcaatttatcttttttgtttgttattgcctctgcttctgatgtcatgtctaagaatccattggccaggtgcagtggctcacttctgtaatctcagcacttcgggaggctgaggcagaaggatcacttgagcccaggaatttgagaccagccagggcaatatagtgagacctcgtttttaagaaaaaaaaaaacattaactggatgtggtggcatttgtctgtggttctagctacttgggtggctgaggtgggaggattgcttgagcccaagaggtcaaggctacagtgagccgtgattgcaccactgcctggctaatttttgtgtttttagtagagacggggtttcgccatgttggccagactggtctccaactcctgacctcaagtgatcttgacctcaaatgatcatcccaaagtattgggattacaggcatgagccaccgcacccagccaccatagctttttaatttttttgagatggagtttcactcttgttgcccgggctgcacaatcttggctcactgcaacctctgcctcccaggctcaagcaattctattgcctcagcctcccaagtagctgggattacaggtgtgcaccacttcacctggctaattagtagagatggggtttcactatgttggtcaggctggtgaccaacctgatctcctgacctcaggtgatccacccacctctgactcccaaagtgctgggattacagacgtgagccaccatgcaggcctctatagcttttttttttcttttgagacggagtttcgctcttgttgcccaggctggggtacaatggcacgatctcagctcaccctgcaacctccacctctcgggttcaagtgattctcctgcctcagtcttctgactagctgggattacaggcatgcgccaccacgcctatctaattttgtatttttagtagagatggggtttctccatgttggtcaggctggtcttgaactccagacctcaggtgatctgcctgcctcggcatcccaaagtgttgggattattggcatgatccaccatgcccggccctctgtagcttttcaatagtcttttttttttttttttttgagacagagtcttgctctgttgcccaggctggagtgcagtggtgcaatcttggctcactgcaccctccgcctcctgggtttaagcaattctctgcctcacctcctgagtagctgggattgcaggcacctgccaccatgcccagctaatttttaatttttgtatttttagtagagatggggtttcaccatcttggccaggccagtcttgaactcctgacctcgtgatccacccacctcagtctcccaaagtgctgggattacaggcgtgagtcaccacgcccagccttaatagtcttcaagttgggtattgtcacacctccaactttgttcttcaatattgtgttggctattttgggtcttttgcctctccatataaacttcagaatcagttttttgaaatacacaaaataacttgttgggatttagattgggatttgcattaaatctgtagatcagattggggagaactggcatcttgacaatattgagtcttcctatccatgaacatgggatatcattttttaaaaattcatctttgatttctgtcatcagagttttgtagttttccccatatagatgtgtactttttttttttttttttttaaagagaaagtcttgctctgtttacccagactggagtgcactggtgccatcacagctcactacagccttgaatttttgggctcatggcaatcctttcatttcagcctcctaagtagctaggactataggtgtgcaccaccatgcctggctaattaaaaaaatatatatatattttttgttagagacgggggtctgactgtgttgcctaggctggtctctaactcctaggctcagcctcccagtgttgggattgcaggcatgagccatcacttccagcccatattttgttatatttatgcctaaataaatatttcatttctttgggtatcccttaattttttagacattgttttctttagttctgtgaacatatttatgatagctaatttattgtgtctagttattctgacattgggctttttcagagatcgtttctgttgactgcttttttactgtgtatgggccatgtttttcttttttttaatgtttaaaaaaacttattactttattattttaatttaatttaatttttatttttattttatgacagagtcttgctctgttgcccaggctggagtgcagtggcatgatctcagctcactgtgacctctgcctcctgggttccagcgattctcctgccttagcctcctgagcagctgggattacaggtgtgtgccaccaaacccagctaatttttgtatttttagtagagacgggatttcaccatgttggctgggctggtctcaaaactcctgacctcaggtgatccacccatcttggcctcccaaaatgctgggattacaggtgtgagccaccatgcctggccaaaacttcttactttaaaaaagaatacagaaacaagatcttgctgtgtttctggactggtctcaaactcctggcctcaagcaatcttcctgccttgggcctcctgaagttctagaattaaaagtgtgagccaccatgcccggcccatattttcctttttgtttgcatgccttgtacattttagttaaaaacaacattttaaattatgtaatgtgaaaaatctgagcatcagattctacctccaccaattcccagtgtttgttgttgctgttgtttctgtgatatgtttgtttagtggccaccctgtgccaattctgtaaagtctgtattctttgtagcattcagccactgaagtctctggttggttagcttactggccagctaatgattggacagagatttcctgaaatgccttgaagcaataaatctcccactctcttcaaggtctgtgtgtgtgtgtttgtgcatgtcttcaattctcccagcagcttacaactctgccttagcctttacttcttggttgcacagagccttaaggtcagccaaggttcaaggttaggggcttttcaggtccttcctgggtaagcgcatgttctttacatgcaggaataagcttttcaaggcccatgtggccatctcattccccagattttccttttttttttttttttttttgtctagccccttgttttactcaactggtattgtcacttcaggcggctgcagtgttaaacagttgctgttgattgctcatctactctggggatgggactattcacacagagtgactctaagtttgatcatattctccagccctgagtctcagcaagctgccagataggcataatagtgatggttacctgagaatgggcttcttgagaagctccaaacctgttcttttcccaccagtggttgctagtcttctgtttctcatggccaccatgattatgaggtttccaatttttgtcttttgcagaactggagagagaggcatgggaataatggaataatgggaatggggcaagttaaaacacacacagtttcttttttttgagacagggtctcactctgatgcccaggctggagtgcagtggcatcattatggtttactgcagcctggacttcctgggctcaggtgatccacctcagcctcccaagtagctgagaccacaggcatgcagcaccatgcctggctaattctcatgttttttttgtagagatggggtctcactatattgcccaggctggtctccaactcgtggcctcaagtgatctgcccatctcagcctcccaaagtgttgggatgatagtcgtgaaccagcatgcccagcccaaagtttgctctttaacaagattcagctgtttttcttaaacactcctcagattgttgcaagctgttggttaacttccacagttatgtaaaagttaatttttgcaaaattttttagagtttttctttctttcatggaggagcagattttttagggtccttattctgccattctagagtggtgcttctctatagtggtgttgttgttgttgttgttgttgtttagacggatttttatacttgtcacttaggctggagtgcaatggtgccatcttggctcactgcagcctccacctcccaggttcaagcgattctcctgtctcagcctcctgagtagctgggattacaggctcccatcttcacacccagctaatttttgtattcttagtagagatggagttttcactatgttggccaggctggtctggaattcctgacctcaggtaatctgcctgccttggcctcccaaaatgctgggattacaggcgtgagccaccacgcccggccctctatagtgttttgaatatcaccttatatagctgttttaatagttgttctaagtattttattacatatacaaaacatattacaatatactgatgtcattttatcagcctgagtgaaatatagaagtcatacctctctgtgtctctttactccccctgtttttaatatatttgtcttaaatatttctatacatacatttatagcagtatcaggctgttagaatttttgcttttttttttttttttttttttttttgaggcagtgtctcgctctgtcaccaggttggagtgcagtggtgcaatcttagctcttggtaacctccgcctcccgggttcaagtgattctcctgtctcagcctcccaagtagctgggactataggcgagcgccaccacgcccagctaatttttgtatttttagtagagatggggtttcactgtgttggccagggtggtctccatctcttgacctcgcaatctgcccaccgcggcctcccaaagtgctgggattacaggcttgagccaccacacccagccagaatttttgcttttaaacatcaaacataatttagaaaagtcagaaatgaagaaaagcttattatatttacaggtatttttgtttccttcttccttgctgatattccaaagtttagtttattgtttcctttctgtttagagtacctccttttgccgcttttaaataatagttctgttggtaacacattttgctggttttccttcatttgagaatgtctagagttccttttcattcttgaaggacatcgttgctgggtataggattctggagtaacggttcttttctctcagcacctgaaaagtttttgtgtcactttcttttggtcactgtggtttctgatgagaagttggttatcatgaattatttttcaagattatttctttgtctttagttttcaaaagtttaattatgatatatcttgagattgctttgggtttatcctgtttggtgtttgctggacttcttgaagctgtgggtttatgtctctgaccaatttgggaagctttcagccattgtctttttgagtacttttttagtcctaccgtctttctcctctttttctgggactcttatgacataaatgtcaggtgtttgtttgtttgtttgtttgtttgtttgtttgagatggagtttcattcttgttgcccaggctggagtgcaatggcgtgatcttggctcaccgttgcaacctctgcctcttgggttcaagcgattctcctgcctcagcctcccaagtagctgggattacaggcatgcaccaccacgcccagctacttttgtatatttagtagagacggggtttctccatgttggtcaggctggtcttgaacttccgacctcaggtgatccacccaccttggcctcccaaagtgctgggattacaggtgtgagccaccgtgcccagctgatcttttgttacaggtccatgggattctgtttatttttattttctagtcttttatatttttattttttagtgggtctcactatgttactcaggctggtcttgaacccctgggctcaagtgattctcccatcttagcctccagagtagctgaaactacaagcacatgccaccatgccctgccacagccattgttctctctgttgtccaaattggctaatttctgttgtctgtcttccagttcactgattctttccttgacctccattattattttcactgtaacttccattctgctgttgagtatatccaactgagttttttttttttttttttttttttttgagacagggtctcacctctgttgcccaggctggagtgtagtggtatgatcacagctcactgcaacctctgcctcctaggctcaagcaatcctcccacatccgcctcccaagaagctgggactacaggtgcatgccaccgtgtcttgcgaatttatttttggtatttttggtagagacggggattttaccatattgcccaggctggtcttgaactcctgagctcaagtgatctgcccacctcagcttctctaaagtgctgggattacaggtgtgagccaccacccccagcccaactgagctttttaatttggttattgtattttttaagttctaaaataagtttttggttctctttttttgagactgagtctcgctctgttgcccaggctggagtacagtggtgttatcacagctcactgcaacctccgctccctgggttcaagtgatccttatgcctcagcctcctgaggagctgggattacaggcatctgccaccacgcccggctaatttttgtatttttagtagagatggggtttcaccatgttggtcaggctggtcttgaacttctgacctcgtgatctgcccgcctcagcctcccagactgctgggattacaggcgtgagccaccgtgcctggctgctaattttgtatttttagtagagacggggttttgccatgttggccaggctggtttcaaactcctggcctcaagtgatctgcctgcctcggcctcccaaagtactggaattacagtcatgagacactacgcctggccttgggtctttttttataccttctatttttttgtcaatactttctttgtttagacttcttgttttttatttcacacatgctcataattgctgcttgtagcacttttctgatggctgctctaaaatctttgttatacagtttcagcatgtctgtcatcttggtgttggcatctgttaattgtcttttttcattcatattgagatttcactggcctttagtgtggcgagtggcttctgattggaatctggacttttagatattgtgtgtgagactctgggtctcatttaggccttctgattttgctggcttctcaggactctggcagggaaagtggtggtgttggggctcgtttctgctaggtaagggtagaagtcgagattcaccaccaggccttgtgtggaccacctaaggtggtccttgttactcatgggtggaaatgctccctccatgtcctccgctgacgccaaggaaaagtagcatcattctcattgggtggtggtggaattcctgactccaccaggctgcctctgataccactgcaatggagaggggaggggcacctctttactgctgagttgggggtagaagtccagatttcactctccactgactctggcagttgctccttactgctgagtgagggtgaaagtcccagctccctgtttggccttctgtgaaaccaccccattgggtttggggtgcctcattatagcctgacaagccaggaagtacaggctcacccctcaacctttactcatgcggcggaaatgtggcggaaacgtgggctgtggctttcctgcctgtgtggctagagtaaggcagttattgtctaaatattttctcactcactaggttgcccttttcttagtcctttgactagggagagccgacctttgttggagcttttcttgtctttgcccactggcatttttgggtcgcttcttctccagctacaaatctgggataataaggcaaaaggaatgcccaaggaagccaccaccgtgacgttgctcaggtcctgaggtcccttgctagtctgccttctctctaccttttagtgtcttctcatttttttttgagacggaatctcgctctgtcacccaggctggagtgcagtggcacgatcttggctcactgcaaactccgcctcccgggttcatgccattctcctgcctcagcctcccgagtagctgggactacaggcgtctgccactatgcctggctaatttttgtatttttagtggagacagtttcaccatgttagcaaggatggtctctatctcctgacctcgtgatctgcctgcctcagcctcccagagtgctaggattacaggcatgagccactgcgcctggccagagtcttctcatttttgtttgtatgtaacatccaggggttttagttgtgggtggcagaaggagtattaataatccttcctagtggaagcagaagtgacaatgttttgatacttttttttccttgagacaggttcttgctctgtcatccaggctggagtgcagtggtacaaccacggctcactgtagcctccatctcctgggctcaagagatcctcctgccttagtctcctgagtagctgggactgcaggcatgtgccaccatgcccagctggttttttccttatttttgtagcaacgggatctccctatgttgccaggtctggtctctaactctagggtacaagtaatcctcctgccttggcctcctaaagttccgggattacaggcatgagccactgcatctggccttgatacatttttttttctttcccactaaataccagaagaacatgatgaattttctgttgactttcccatctgggtggacttttagtaacctctagagtcctcagtttacttctgtcacccacctgttcacagagggatggatgtagtagccttttgctcagtttctttggcttttgtcagtgatgtttgtcattcatctgttcaaatgtttattgagaacctattttgctggggctgatgaggcctaggaagatgccctgtaggaatgcatgtgtagcgtcagatgttttttatctatgttatgttatttgatctttgcaactttggaagtcagcagttataatctctcatagatgaggaaacagacccacagagatgaaggaaccaaggtagttccaccaaatgttgtttccttgaaggtagtggggcaactatttacttccaagaatgttttctataccagtgattaggggacttgagtgttggccaaatatgattgaaattgggccaggtgcggtgtcacacctgtaatcccagcactttgggaggccgaggggggtggatcacttgaggtcaggagtttgagaccaccctgaccaacttagtgaagccctgtctctactaaaaatacaaaattagcggggcatggtggcgcacgcctgtaatcccagctacttgggaggctgaggcaggagaattgcttgaacctgggaggcagaggttgcagttagtcaggattgcgccattgtactccagcctgggtgacaagagcaaaactccatctcaaaaaaaaaaaaaaaaaaaaaaaagaaattgacttgcccccctccactcagtctttaccgagtacatatttgagtgctgctgtgccagccatcgtggatgtggtggtgaccagtgcaggcagggctgtgttcccatggcacttgcagactgccctcatgtgctctttgactggtaggtcagttgggtagattggaacgaaagacccagtctctttttctcccagtttcagtaattgaatccacatagatcatactacattaaatgaatgttttagaggctgggcgcattggctcacccctgtaatcccagcactttgggaggccgagatgggtggatctcctgaggtcaggagaattgcttgaacccgggaggcggaggttgcggtgagcccagatcgtgccattgcactccagcctaggcaacaagagcaaaactccatcaaataaataaatgaatgaatgaacgtgtgttttagtatggagatgagtgctacaaaaggttcagttttatatggaacaggtagtaaaataacacagtcaaggcttaggagtttggtctgtgagtttaaggtattgtgagtgggctaggctcgatggctcacacctgtaatcccagcactttgggaggctgaggttggaagatcatttgagtccaggagttcaagaacagcctgggcaacatgttgaaaccccatctctaccaaaaatacaaaaattagccgggtgtggtggcgtgtgcctctagtcccagctactcaggaggctgaggtgggaggatcacttcagcccagtaggtggaggttgcagtgaggtgagatcacaccactgcactccagcctgggtgacagccagaccctgtctcaaaaaaacaaagtaaaataaaaaggtattgtgagcaagagctctgtcgacatggcatcaacacagtaaagtcagttctggttgtcttatatcccgtagctatgtggtggtgattttcttgtgttctaatgtcctgataaacacattcacccagacttcgagcaggagatggcactttctggctcagccacatgcaaattctgatcctattatttctagttccctcctccaagtttttcatttggcagccaaccttagaaaatagctgtaatcaatgtagaagtcagactggggctgacttttatcagtcaggaaggtattaaattagcagtccaagacttgggcttccacttgtgccttagccagtctttgtgagaaccttggtcaaggctgtctctccaagcctcagtttcctggggataacacctgcttggcttatcttacagagttaataagcatcaaagaacttactgaaggactttataaattaaataccattatgtagaatggtggtggttagtgcctttatttatttattttttgagacagggtctccctctgtcgcccagtctggagtgcagtggtgtgatctcggctcactacaacctccacctcctggattcaagcgattctcttgcctcagcctcctaagtagctgggattacagacgtgcgccaccatgcccagctaatttttgtatttttggtagacatggggtttcaccatgctggtaaggctcttctcgaactcctgacctcaagtgatctgcctgcctcggcctcccaaagtgttgggataacagacgtgagccactgttgggataacaggcgtgagccactgtgtttagtggttagtgcctttagaatcctgaagttattgatgaataggtcgaagtccagagctattgttttggagttgtttgacaatgagcagttgttttgactaaaagggatcatcagagaaagtgttgcttttgtaaggaacagaacttgcttgaatgagttgtttgaaattgttttctctgaataactgagtgaataggaaacaaaaggatagctgaggccctgtgtcttgttctttctcacccatgatgtaaattaactcattatcgtacaatcaggatcaagttgctttagaattcctctctgtcagtgcatgaaacaaaatgacacagagaaaccatcctgattgattttggaattagatgggaatgcaaagtatctgattaagttatatggagtatccagaaactcccattgctgtgcaggtaataattttatttatttattattttacttatttatttttttgagacagagtcttgctgttgtcgcctgggctggcatgcaatggcacgatctcggctcactgcaaccttcgcctcccggattttagcaattctcctgccttagcctcccgattagctgagattacaggtgcctgccaccatgcctgggtaatttttttgtatttttagtagagacggggtttcaccacgttggccaggctggtctcaaactcctgacctcaggtgatccacctgccttggcctcccaaagtgctgggattacaagtgtgagccaccgcacccggccatgattttatttatcttaagagcattgtgctttgtagaggttggtataattgaaatattattctaggaattggcaaacctccacagatcccagatggaaaagacttccttagaggataactaacaggtcagtcatttggccaattttgtttgcaaagccaatcttgaatttcaaggaggaactaataatctatgtgatgccaactcttttgaagactctgccccattgttctgtctgaaatttttttctcttgagaattttttttttttttgagacggagtttcgctcttgttgcccaggctagagtgcaatggtgcgatctcggctcaccgcaatctccgcctcccgggttcaagtgattctcccacctcagcctcccaagtagctggggattacaggcatgtgccaccacacccggctaatttgtttgtgtttttagtaaagacagggtttctccatgttggtcaggctggccccaaactcccagcctcaggtgatctgcccgcctcggcctcccaaagtgctgggattacaggcgtgagccactgctcctggccactctcttgataattttttaaaaactattttgattttttttgtaaggatgaattcaaagttatatgaatactaaatcttacatcttgggatatttatcaaatgttattaaaatattctgtgtttatgatgctccctcttttcccttaggacaaatattctgtcttacacacacatagataaatatattttactgacttcactgtttttgacctgaacagtcttgctcctgtgaaggtttatcatcttttccttggaaatataaattacattcctcatagataggaccagaccaataaatgtttacttacgtgtgtctgagattgtttgtttgtttgtttgtttgtttatttgagacagggtctttctctgttgcccaggcaggagtgcagtggtgcaattatagctcagtgcagccttgaccttctgggctcaagtgattctcccacctcagcctcccaagtagctgggactacaggcgcgtgctaccacgcccagctaatttttgtatttttagtagagacagggtttcaccatgttggccaggatagtttcgatctcttgaccttgcgatccacccgcctcagcctcccaaagtgctgggattacaggcgtgagtcactgtgcctgggccagctaatttttttttatttttgtagagacgaggtctccctgtgttgcccaggctggtctcaaacccctgggctcaagccattctcctgccttcgtctcaaagtgctgggattacaggtgtgagccatcacccagctttaaaaagtatattgaaaataggatgatttaagcatgagttttttgtgtgtttgtttgtttgtttgttcgtttttcagtagagatggagtttcaccatgttggccaggctggtcttgaactccttgtcccaagtgatctgcccgccttagcctcccaaagtgctgggattacaggcgtgagctgccgtgcccagccaaatttaaatttcttgaaataattgctaacactgtagcaaagctttcctttgttgtgtagtgcatataggaaaccaggttgatgtgaaatttctaacagctcataagagtctacatactaatagtatttagtactttctagtgccctgctcttcatatgtcatgtaaatgccttggctgtatctagtatagatagtactagtgggattcagtataatccttaattttttgtttgtttttagtaattcttgtaagcagttagttaagaacttgttttgaatttttggtgctggtaagccaagactgcgagaacttgttggattcttaaacacttgaacatttaccatgcattaggtgctgaggatggaaaaaagagtaagactcagcatggcccccaggaatcaggagtggctgtattaatatcagacaaatcaaggcaaataattttgccatggttgaagaaggtcttttcctaatgataaaggggtcagttcttcaagaggacaaaacagttctaaacatttataaactaaatgacagtgtttcaaagtatatgaagcaaacactgataactgcaaggagaaatagatatatccataatgatagtgattccattattcttctcttagtaattgatagaataaggagactgaaaatcattaaggatgcgggagacttgaacaaccccttcagcctgctggatctgactgacagtcatagcacaccatccagagagagcagaatgtagttcttttttagtataaacacaaagatagatcatattcttgtgagccataaaataagccccaaattgataattatgcaagccatacaaaatatattctctgaccacagtggaattaagaataattctaataacagaagtatctttggaaatgtcctgaatatttagtaactaaataacatacttttagataacccataggtcaaagaagaagtcaaaagtgaaattaaaaagtatttagaaccaaatgaaaatgaagacacaggccaggcgcggtggctcatgcctgtattcccaacactttgggatgccaaggccggcagattacctaaggtcaggagttcaagaccagcctggccaatatgatgatgaaaccccatctctacaaaaaatacaaaattagccgagcgtggtggcacaccctgtaatcccagctactcgggaggctgagacaggagaatcacttgatccagaggtggaggctgcagtgagccgagatcatgtgaccgcactagccaagatcacgccactgcactccagcctgggcgacagagcaagactccatctcaacaacaaaaaaaagccagatgcggtgggaagaagctcctgcaagaggccacggagccagcgacgggaggccttgaagccagtgacgacccactcagccgagctgccgctttcgcagcacgccaaggacactcatgaggaccatgatacttccactgagaatgcagatgagtccaaccatgaccctcagtttgagccaatagtttctcttcctgagcaagaaattaaaacactggaggaagatgaagaacttttaaaaatgcagacgaaactgttctgatttgcctcagagaaggatctcccagaatggaaggagtgaggcaccggcaacgtcaagctcctgaaacacaaggagaaagggaccatctgcctcctcatgcggagggacaagaccctgaagatctgtgctaaccactcttcacgctgataatggagctgaagcccaacatgggtagtgaccatgcctgggtctggaacacccacgccgacttcgccaacgagtgccccaagccagagctgctggccatccacttcctgaatattgagaatgcacagaaattcaaaacaaagtttgaagaatgcaagaaagagatcggagagaaaagaaaggatcgggcaaaaacgatcatgccaaaaaaagtggcggaaaagctagaagctcttttggtggaggaggaaaccaaggaggatgctgaggagaagcaataaatcatcttattttatttccttttcctccctttcctttccttttcaaattttaccctgcccctccttttcggtttgtttttattctgttttgtttttacaagggatgttatataaagaactgaattcaacattcaaaaaaaaagattaaagcataaatcaatgaaatagaaaacaaaaaccagaaaaaagctaaaaagctgattctttgagaaaatcaatgcaattgataaacctttatccagactggttaggagaaaacaagacacaaattacctaccgtaccaagtgttggtgaagatgtggaggaactggatctctcatgttctgctcatgggactgtaatatggtataaccactttggaaaacagtgtggcctttttttttttttttttttgagatggagtctcgctctgtcgcccaggctggagtgcattggcactatctccactcactgcgagctccgccttccaggttcacgccattctcctgcctcagcctcctgagtagctgggattacaggtgcctgccacccagtccggctaatttttttgtatttttttagtagagacggggtttcaccgtgttagccaggatggtcttgatctcctgacctcatgatccgcccaccttggcctcccaaagtgctgggattacaggcgtgagccactgcgcccggcctatgtggcctttttataaagagttaaatatacacctactatatgatccagccattccactcttaggaatttatcaggagataagaaagcatgtggctggacacgtaattccagcactttgggaggccacggtgggcagatcatctgaggtcaggagttgaagaccagcctggccaacatgacaaaaccccgtctctacaaaaaatacaaaaattagccaggcgtggtggcacgtgcctataatcccagctacttgggaggttgaggcaggagaatagcttgaatctgggaggtggaggttcacaccactgcactccagcctgagcaacagagtgagactctgtctcaaaagaaaaagaaagaaagaaggaaagaaagcatgtgcccatacagagatctgtgtatgaatgttcacagcagctttgtgacagccaaaaactagaaacaaccggaaagctcagcaatacataaatggatacactgtgatatattcacccagcagaatattactcagcaatgaaagggaatgaactattgatatgttattccatggatgaatctccaaaacatgtgctgcgtaaaataagacaaaatggccaggcgcaagtggctcacacctgtaatcccagcactttgggaggtcgaggtgggtggatcatttcaggtcaggagttcgagaccagtctggctaacatggtaaaaccccatctgtactaaaaatacaaaaaagttagccagatgtggtggtgcatgactgtagttctggctatttgagaggctgaggcaggagaatcgcttgaacccgggaggcagaggttgcagtgaactgagaaatcctgccaccacacttcagtctgggcgacagagcaagactccatctcaaaaaaaaatcagacaaaaaaaggcaactttatgatttcacttacgtgaaattctagataggtgaaactatagtgacagaaagcagatcagctgttgcctggggcaacacttagtgaaaaatcactaaggggcataaggagatgcttgtggtgatgacgttccttatcttgattgtgctaatgcttatatgggcacatacagccttcagagctcatgaaattatatactttagatatgcacagtttctcatatctcagttttacctccctaaaactattaagaaatttgtgcttaatactttggtgagcattttatgccctttgccccatgtagttggttctcactggtaggtaggcaggcaggtagaattagcagctttaggtgagacagagctgagcggaggttccttcactcagtcaggctctcccggccagtggcttgcagaccaggccaggctgctgcccttctttggtgctgctgcagagggaagtgtttggcatgtggggtctctacagttagtcctggtttctaagagtctaaggctgttttattctctcttttctttagtcctttgggagacaacattctacttatgttctcttaatgttttgtcccctaggcattagcagaaccaagggctgcatgagttttgagcttgtgtctggtgttttccctcagggcacagtcttttgctgagcgcctgcgcctgggaattgcagtgattcatggagaggcgcaggatgccgagtcggacttggtggatggacggcattccccacccatggtcagaagtgtggctgccatccaccccagcctggagatccccagtaagtgtgctgctgcctctttcccactttcctctgattttaaggctgactacactgttgtctgtgtggtttttttcctcattcttcgtttttttttagttggcaaaaactcattaacacctttcttggccagatagtagcgaatgcatttctgattaccttgtaaattgtaaggccgtttagaagcagtctgtccttctttgcaagacctgtgaaaatgtttggactattgagacagttgcaatgcttcagggaagtccattcattcattcagcagtatatactagagtgtagtttaacataagcaaaaagctttttatatacaaagttattgactgtgatgttgtttttaatgcaaaatattagaaaggtttaaatggtttaccagagtgtagggcttggtaaattatactgtgtcagtacagctaattatgcagccctttgaaataatcaagactatctggaaacgagaaaaatatatggaatatatatgaacaaggcagaatataagattgtatacctatttgtcttagttcaggctgctgtgatgaaataccttagactgggtaatataaacaacaaatttattgctcacagttctagaggctgtgaaggtcaagataaaggcgccagcactgaccccgtgatgggccgggcacggtggctcacgcctgtaatcccaacactttgggaggccgaggcgggtgaatcacctgaggtcaggagttcgagaccagcctgatccacatggagaaaccccctctctactaaaaatacaaaattagccaagtgtggtggcgtatgcctgtaatcccagctccttgggaggctgaggcaggagaatcgcttgaacccgggagacagaggttgtggtgagccgagatcgcgccattgcactccagcctgggcaacaagagtgaaactccttctcagaaaaaaaaaaagataaaggcgccagcagatttggtgtctgtcgagggcctgttcctcgtagatggtaccttcttgctgcatcctcatgtggtggagaaaggtggaagactccctcaagcctctctgacaagggcactgacccccttcgtagagcagagtcctaacaaactagtcacctaaaagccctacctcttaataccaccacagtgggttccagcatgaatttggaaggacacaaaaattcagaccatagcattttgccccggcccctcaaaattcatgttcatcttacgtgcaaaatacattcattctatcctaatagcccccaaaatgttaactccgggtaagtcttaacttaatttcagcatcacctcaaaagtctgaagtccaaagtcccatctaaatatcatctaaatcaaatatgggtaagactccagctctgggattcactctgacgcacgtttctctccggctgtgagcctgtgaaatcaaacaggttgtatgcttccaaaatgcaatggtgggacagacattggatagacattcccattccaaaaaggagaagtgaggcccagtgtggtggttcacgcttgtagtcccagcgttttgggtagccaaggtgggagggttgcttgaggccaggagttcgagaccaaaagggagaagtaggaagaaagaaaggagtgacaggtcctgaccaagtctaaaacccaaccagacaaacaacattaaatcttaaggcttaagttgactcaaagccccgccttccacaaaaactggggcaggggttggtcttgcaaagctctggatggccccactcccacagctttgctgggagcagcccatgcagcagctctcagtcactggattctcatgcctgcatctctcaggctggagttgcactctagtggttctaccagtcttgggtcttggggtggtcttgccccacaactccactgggcattgccctagtggggtctctctggtggccctgcccttgtgacagttctctgcttgggccctggcactctttggggcatcctttgaagtctgggtagaggtagatgtgcccccacagctcattcactctgtgcactgtggagatggccctgcacggacaccactgtggtttgttgcctgtgccttccagaggggtggcccgagctatagttggacctgcttgagctatagctggagtgggtaaggagtattctggaatgtgggaagtggagccttgaaatcgttctgcccccaagaccctggcattctaggcttatgatgagatgggcagtcacaaagatctcagaaatgcctttggggtcattgagtcactgtcttgatgaatagcgtctggttctttttttttttttttttttttttttgagacaaggtctcactctgtcacccaggctggagtgcagttgtgcgatcatggctcattgcagtctcacctcctgggcccaagcagtcctcccacttcagcctcatgagtagatggaactacaagcacttgccaccgcacctggctaatttttgtattttttgtagagacaaagttttaccatgttgcccaggctggtcttgaactcctgagctcaagtgatccacccgccttaacctcccaaagtgcttacaggtgtgagccaccactcctggccgtctggcttctttctatccatactaatctccttatcaaatgtttgcttggtggctgggcgcggcggctcacacctataatcccagcactttgggaggccgaggcaggtggatcacgaggtcaggagatcaagaccagcctggccaacatgatgaaaccccgtctctacaaaaaatacaaaaattagctgggcatggtggtgcgtgccttaaatcccaactactcgggaggctaaggcaggagaatcacttgaaccagggagttggaggttgcagtgagctgagatccaagactgtgccaccgtactccagcatggcaacagagtgagacaccatctcaaaaaaaaaaagaaaaaagaaaagtttgcttggctacacacttggagttctgtcctgaacatgtttttgcttttttttttttttttttttttttttgagacagagtcttgatctgtcttccaggctggagtacagtggtgcgatcagatctcactgcagcctccacctcccgggcccaagccattctcctacctcagcctcccaagtagctgggactatagatgtgtgcaccaggcctggctaattttttttttttttttggtagagacggggtcttgctttgttgcctaggttggtcacaaactcttgggctcaagcaatcctccctccttggcctcccaaactcttgggcttataggcctgagccattgcatccagccttgcttttacattctttacaagatggccaggctgataattttccaaatatttaagttctacctcccctttgatgataaatctcatctttaattcatcttcttggattttagtataagcagtcaagagcagccatgcaccctcttttgccaaagattctatttcactgccctttttttttttttgagatggagtctcactctgtcacccaggctggaatgcagtggtgcaatctcggctcactgcaacctccagctcccgggttcaagcaattctcatgcctcggcctcctgagtagctagcactacaggtgcacaccaccacacctggctcatttttgtatttttaatagagatggcattccaccatgttggccaggttggtctcaaaactcctgaactcaagtggtccgcctgcctcagcctcccaaagtgctggggttacagacatgaaccactgcacccgacctttttttttttttttttgagacagtgttttactctcttgctcaggctggagtgcagtggtgtgatcacagctcacagcagccttgacctcctgggctcaatcgatcctcccacctcagcctcccaaatagctgggactgcaggcatgtgccaccatgtctggctaatttttgtattttatgtagagatggagttttgccatgttgcccaggttggttttgaactcttgggctcaaagcgatccttccacctcagcctcccaaagtgctgaaattacaggtgtgagccaccatgaccagcctactgtctgtttttctactagcattgtgatcatgaccacttagatcatttctaagaagattgaggctttctttacagctgttttcttctgagcctgtcttagtctgttttgtgttgctataacagactatataagactgggtattctataaagaagacactttatttagctcacagttcttcgggctggtaagttaaagagcatagcatcacatctggcagtttctggtgagggccacacactaggttgaaacatggtggagaagaaaagtgagcaggcgggtgcagagaaatcacatggcaagagaggaaacgagagagcctgggaagccaaactcatttttataacaacctgttctcatgggaactaagtgccctgagagcaagaactcactcacccccataggaaggcattaatccattcatgaaggatctgcctctgtgacccaaacatctcccactaggccccacctctcaatagcgcacactggggatcaatttttttttttttttgagacggagtcttgctctgtcgcccaggctggagtgcagtggtacgattttggctcactgcaagctccacctcctgggttcaagcagttctcctgcctcagcctcccgagtagctgggactacaggtgcatgccaccacacccggctaattttttgtattttagtagagatggggtttcaccttgttgcccaggctggttgaactcctgagctcaggcaatctgcctacctcggcctcccaaagtgctgggattacaggcgtgagccactgcgcctggcccaaatttttaacataagttttagtggagacaaactacatccaaaccaaagcagaactctcaccagagctcccctttacggtctgtacatagcaatacagtctttttctagccttttcctcttccagcctctgcccattacccagttccaaagccactcctgcattggtgggtatttaatacagcagcaactcacttctcagtaccaatttctgtcttagtttgttaaggctactataacaaaataccttagacttggtattttttttttttttttgagacggaatttcgctcttgttgcccaggctggagtgcaatgacacgatcttggctcaccgcaacttccacctccacctcccgggttcaagcgattctcctgcctcagcctcctgagtagctgggattacaggcgcgcaccaccacgactggctaatttttgtatttttagtagagacagagtttctccatgatggtcaggctggtcgcgaacccctgacttcaggtgatccgtccacctcagcctcccaaagtactggaattacaggcatgagccactgcacccggccagactgggtaatttataaacaacagaaattcattgctcacagttctggagactgggaagtcctggatcaaggcaccagcagattggtgtctgatgagggctcactctgctcctgaggtggcaccttgttactgtgtcctcagatggtggaaggagcaaggcagctctctgtaagggcactaatcctgttcatgaaggcagaggccttgagccttaatcatttcccaaaggccccactgttaatactatcacattgggtattaagttccaacatagcattttgagaggacaccatcttcagaccacagcactctctttgtctatgcaaagaccaggaggaaataggaagaatgaatgtagttgggttggggtggtagagttatgcatgaatttgtttttgtgtttaagaaacttccccatgccttaataacatcttcttaattaaaaaaaaaaatgccaccttcgagttgttggggaagaaccctaaccccctgccctcatagattcagtgtttggtggcatatggactaaactggcaaaagacagatgaggaagaggaaaggcagtttaatcacatacatacagatgtgtgtgattaaactcttttgtgagtcacaaaaatgtgactcgaagtggttacaatttggggcttatatagcatcttaataggggaacaggaggggcagaaaaggcccctgtgggaaaacagatgacttctttttttttttttttgaaacgctcttttgcccagcctggagtgcagtggtgcaatcatggcacactgcaacctcggcctcccaggttcaggcgattctcctgggtagctgggactaccggtacatgccaccatgcccaggtaattttggtattattattattattattattattattattattattatttttttttttttttttttttttttttttttttttagtagagacagggtttcgccatgttggccaggctggcctcgaactgactgcaagtgattcgcccgcctcggcctcccaatgtgctgggattacaggcgcccggccaagatgactccttaataggggaagaggaggagggaggggactgatgggaagtgggcgctgaggagaaaagatgggagagaggctagtttttgacagcgtctgtttaggtgtggtctggacttcttctggtcttaagcgataagagtcagtcttccctggtgttcccagggaggagatttatcacagttgagttctttggagttattttgtgaggctctgcttttcagcatataagggacttcaggaactcaaatgctttcagctcaaaataatttttaggtcacagaggtatattctggactgttaggtttttgccttgcccaggagtttgctcatttataaatagagggaaaaaaaaaccagagaaggaactagtgtggttgggatagccatgcacgcagctgggattccagctatactttgtagatcccaactgaggtggaaagggaaggccatctgggcaggggttaaatctcctaaggggtgggggactgagcttgagtttgcatctggctccatcacttatcagctgtgtgttcttgggcctgttgtttttctgaaaaagagcgacagcaagaggccatcctcagagtggacccatgataggccaagatggtggaaagcccaggacgagccctcaggacccagcactgcctgccttatgtgagtgagataggactgcagtggtgagacgttcagtgatgggccatggtgtggccaggaagacactagcctgactaccaggaggcccctggagggaagagatggactaagatagcagtatctgcggggagccaaccaaggaggactttgaataccagtaaatacactcgtgtcctagaaggcagcccacaaaggctctcgatccgggccatttagtgttcagcaggccaggcctgcatctgtgtttgggatagggctgcaagtgcagaggccagatccgggaggctgatgaagttgagcaggcacatgggaggagagcttgatctcttgggctatgctgtccagtcgggtggccactggctacatgtggctcctgcacactgggaacggggtggggagcagtgggagtgtgaaggacacacccctaatctgaaaactttaatgtaagtatctcattagtgaagttttattgactctgtgttaaaatggtaatattttgatatgttgaatcaaatcaaacatgttattaaaattaattttacctttttttgtgcttttgtaatgtggctactagaaaatctgaaattgcatatgtggctttcatttctgttgtgcgttattgctctaggggttggtaacaatgggaatgaaagtgacagagcacattgagaaatgttaaaaagacgatgggagggaggccaggtactttggcgcactcctttaatcccagcactgtggaaggctaaggtggaaggtttgcttgagcccaggagtttgagaccagcctgggcaacatagcacaaccccgtttctacaaaaagtttaaaaattagccaggcggctgggcgcagtggctcacacctgtaatcccagcactttgggaggccgaggtgggtggatcatgaggtcaggagttcaagatcaaactgaccaagatggcgaaacgctgtctctactaaaaaatataaaaattagccaggtgtggtggttcgtgcctgtaatcgcagctactcaggaggctgaggcaggagaatcacttgaacccaggaggcagaggttgcagtgagctgagattgtgccactgcactccagcctgggcaacacagtgagactacctctcaaaaaaaaaaaaattagccaggcatggtggtgtgcctgtaatcccagctacttgagagtgaggtgaaaggatcacttgaacccaggaagtcgaggctgcagtgagccatgatggtgccactgcactccagcctgtgtgacagagtgagaccctgtctctaaaaaagatagcaggagggaatgaacatttttagtgtattagtctccagtacagcccttttaattgagtgatgattttccactttatagataaacaggatcagaaagagaaagcgacttccctgcagtcacatagtgacaagctggacatgtctgactaaaacctgtgctttttccactgtgttcttgggtctcttggacttagtaatggggatttaaggaggaggaaggcagtgagatagagccagggttcaggatttggggctgggagggtgttaataaagcgtttggctcaggacctcaaagccttttgcttgtgtgtgcatttctcacagcctcacgtgcccaggctgttggtgctggggggtaggcctggggctgccgctccctttcagaatccttgcctggcctcagaggggcttgtgtctaggaacctcagcagaaccctgcaagggctggctgggaccattggtgagatgagccatgcccgggagcatggaagaatatatgttcctcttcagtcctgtaagcacatgggctgtgatgaggaacgcgttggcagtctttagatgaacgctgcttctttggaacttgctgggtgttagcttttggtgtggcctttgggagtggactctggactgcagacactgaactacaggtttcccatctggaaatgagttcataggactggatgatctctatgttctttctaatatttctttactcgtgggatctttatgtttcattcataattttaattataatgtttctatgtttatgttttgactcaagtagtgatcactacaggccgtctttgggaatgcagtagaattttagtttcatagatcctaaatatttgattgtttttatacatttgatgattggacaccctacatagaatacttttttaaggtactagcaaataatatatgaagggaaaagaaagcattcttcctgtagcatctcgaatataaagattttgttatttagtattagattttaaaaattattttgtatcctctgatttcttatagatgaaaatatgcctactaaaaaacaatgaaaatactttttcagaatataagcactatatataatatttgaaaatattatccataaaagttagaagaaaataataattagtgcttgatgccactattcaaagacacaccactttaatttggtgagcctctttttggtttttcacccttattttcataaagctgcgatgcatgcttcatacataattgtgcatgttgctgcctccttctcccagctgcccgacgtgtcatctcaggtcaccagaaactttgacaggaaacagcaatttcttttttttttctttgagactgggtctcactttgtcacccaggctggagtgcagtgacaatcacggctcactgcaaccttgacctcccaggctcaagcgatttgtccacctcagcctcttgtaaacagcatttttatggctaataacccatcgtatgaatgtggcttagactgcccaaccacagcctaatttggggtttttatgttttcttctgttctttgcccttataatgtggcaggaaatatatgtggataaaacacttttcccatactttggcttatttcatttcaagcttctaaaagtgagattaatgagtcagaaggtatgaatataaggctttttgtcaaattgatttcctagagggtgattcattatactttttcaccggcattgaggtcaagtgtcctgggagtaggactgttgaaaatgtaaaaagtcacttcagttctggaatttatcttgctttgctttgttttgttacacttttttgccctctcctgatgctcacctggggtcacacattgcctctggttgtcatatgtctttcatctctttcaatctagagcagtggttctcaattagggagtggatattgtctcctagaggtcatttggaaatgtctggagatagttttgattgtcagaatcaagggggtggctactggcatctagtgagtagaggccaaacatgctgctaaacttctcacagtacgtagggtggtcccttgcagcataaacgtgtctggcccaagatctcagcagttgaaaagtcccaatctagaacagtattttaactttttctttttgtgacattgccttaaaagaaaattgaagtcaaagtcacataacatagaattaaccattttaaagtataaaatttactggctttcagtatattcacagttttgtgcagttaccatttctttctagtttcaaaacttctcattaccccggaagaacaccctgcacccattaagtagtttcaccatgcccccatcccccagcccctggcaaccacttacctcttttctgtttctgtggatgtttgcctaatctggacacttcatataaacggaatcatataatatgtgggcttttgtatctggcttctttctttgagcatgtttttgaggttcatccatgtgatagcacttgtcagtacttcattgcttttggtggctggataatatttcattgtcagcatttgaaaggaatttgggttgtttccacttttggctatgctgctctgtatattcatgtatgagttttctgtgtggatagatgattcatttctcatggtctatacctggtatcggaattgctgcgtcacttggtgtatgtttaactttttgaggaactgccagactcttttttcacagcagctgcaccattttatattcctaccagtaatgtacaaagatttcagtttctccacatcctcatcaacacttattttctactttttattgtagccagcccagtgggcataaagtggcatctcattgtgattttgataaacatttccctaatggctaatgacttcatttgtatatcttctttggagaaatatctgttgaaatcctttgcccatttttgaactaggtttgtctttttttgttgaattataaaagttctttatatattttggcatatggcgcatatatatatatataatttttttttttttttttttttttgcgacagggcctcactctctcacccaggctggagtgcagtggtgcaatcgtggctcactggagccttgacctcccgggcccaagtgatcctctcacctcagccccctaagtagctgtgactactgtcatgcaccaccacgccctgctaatttttgtatttttttatagagacagggtttcgccatgttgctcaggctggtctcaaactcctgaactcaggcaggcaatctgtccacctcggcctcccaaagtactgggattacaggcatgagccaccatgcccagcctactttatatattttggatactagactcttaccagatacatgatatgcaaatattttctgccattctgtaggggttttttttacttttttatttttatctatttatttatttttatttatttattttttgagacagagtctcgctctgtcacccaggctagagtgcagtggcatgatctcggctcactgcaagctccacatctcaggttcacgccattctcctgcctcagcctcccaagtagctgggactacaggcgcccactagcacacttggctaatttttttttttttttttttttttgtatttttagtagagacagggtttcaccatgttagccaggaaggtcccgatctcctgacctcgtgatccgcccgcctcagcctcccaaagggctgggattacaggcgtgagccaccacgcctggcgtggaattgctttctcaattccctcttttgattgttcagtgctgctgtgtagcagctgattttgtgtgttgattttgtacttggcaacttggctgaattcatatattattagctttggtaggtggatttgtggattcttgggtattttcaatatgtaggaacatgtcatctgctaatagagatagttttacttttcctttctgatctggatgcctttcatttcgttttcttgtctaattacccttgctagagtatccagtatgatggtgaatggcagtggtgcagtgggcatccttgtcttgttgctgatcttaggggaaagcttttggccttcggccataaagtatcaagttagctgtgggtttttgtagttgcccttaatcagattgaggaaattcccttgtattcctagttggttgaatgtttttatcttgagatattaacttctttaaagttttgttttactttttaatataaaaattttggtgtgtgtgttttattccaaccagtgctgattcctaaagaaaagcccccaatcacggttgtgggtgatgttggaggaaggattgccatcatcgtggtatgtagacctcttttattattaattctagtatttgccattgttattctgttgattgattgattgattgattttattacagagactcactgtcgcccaggctggagtgcagtggcacaatctcggctcactgcaacttctgcctcccaggttcaaacgattctcctgcctcagcctcccaagtagctggaattacaggtgcctgctaccacgcctggctaatttttgtatttttagtagagatggggtttcaccatgttggccaggctggtctcaagctcctgaacttaagtgatccacctgcctcggcctcccaaagtgttgggattacaggcgtgagccactgcacctggccaatttatttgttaattctgggcatataaaggcctaaggatagtagtatggccagataattcttattaaatttgtgccttgtgctaaatgtttgctttggcccagaaattggaaaatgctattgtttattttaaaattgctcactactggctgggcgcgttggctcatgcctgtaatcccagcactttgggacgccaaggcaggccaatcgcttgggctcaggagttcaagaccagcttggacaacatggtgaaaccctgtctctacaaaaaatacaaaaattagctgaacttggtggcacatacctgcagtcccagctacttgagaggctgaggcgggaggatcacttgagcctggggctcagaggttgcagtgagccgagatcatgccactgcactccagcctgggtgacagggtgaggctgtgtctcaaaaaaaaaaaaaaaaaaagtcatcctgtcataacatgagatattgttctgtgatcaaagtaaagtacaagctgggcacagtggctcatgcctataatcccagcactttgggaggccaaggcaggcagatcacctgaggtcaggagttgaagaccagcctggccaacatggtgaaaccccatctctactgaaaatacaaaaattagctggacatgttggcgcacacctgtaatcccagctacttgggaggctgatcttggagaatcgcttgaatctgggaggcggaggttgcagtgagccaagattgtgccactgcactctagcctgggcgaaagagtgagattccatctcaaaagaaaaaaaaaaagtaaactacaaagttgattataactgtttgaaacatgcatcctttcacacatcataagaccagtgcacaaaaagagtgcacttcatgcctgtatattttaaagaatagaatgaacactgggtacccgctagctcacttgaggcatagatcatcaccaggtacctagaggcctcctctgggcttaccctggtctctttgcctcagaggttgtcactgatgtgaaagctgcccatcttgatcctgtagtcagccatgagggcttgtggccttaaatgctgcctttttttcttgtctttgatgtttatgtaaatgatgtctttgtgtactttgggactttcttgctcaacactgttattgaaatttacctgtgtagtggcaggaagttgtacttcattctttttcactgctatgtgttgtgtctttggtataactgctacacaactgattgaggcaatggtactgctttgaacatcctcgtgcctattttctggtgcaaaagtgtgagagtttcaaggtgcctgggagtggggttgttgggtctgaaggtatgcacatttttaactttacaaggtgctgccaaattgtttccaaagtggtcacacccatttcccaagttccatagtgggtgccccacattatccccagtgcttgataattttgtacgcacccttttcaggttagaaaatctctctggggccgggcacggtggctcacttctgtaatcccagcactttgggaggccgagacgggtgtaggtcaggagatcgagaccatcctggctaacacggtgaaaccttgtctctactaaaaatacaaaaaattagccgggcgtagtggtgggctcctgtagtcccagctactcgggaggctgaggcaggagatggcatgagaggcggagcttgcagtgagccgagatcgtgccactgcactccagcccaggcgactgagcaagactctgtctcaaaaaaaaaataagaaaatctctcacgtcaccctccagggtaatagctgtccattacttattccttagttggcaaagtctatagtaacaaggtgctgtggattcagtagcacctttccccccgttctagtgccactgcattatttatttatttatttatttatttatttatttctatttttttttttgagacaaagtctcgctctgtcacccaggctggagtgcagtggcgtgatctcagctcactgcaacctccacctcctgggttccagcaattctcctgcctcagcctcccaagtagctgggactacaggtgcacgccaccacgtccggctaatttttgtattttttttgtagagacggggtttcaccatattcaccaggctggtttcgaactcctgacctcgtgatctgcccgccttggcctcccaaagtgctgggattacaggcgcaagccactgcacccagccgccagtgcattttttaaaaaaacgtttttattttgaagtaattatagatccacaggaagtagggggcaatacacagggacatcctgtgtattcattacccagcatcctccatcttgcttaactatagtacaataacacagactgaaaattctcggtgccacagccacagaggtccttcagacagcaccagttgtgcatgtagtgagtgtgagtgtgtgtgtgtgtgtgtgtgtgtgtttgtgtttgtgaatgcagtcttaccatgggtagctttgtggaaccaccaccacagtcaggacacagaattgctccttcactgcaaggcaccctcatgcttcctttcatagctacactgacatccttcccacccaatctgcaaccccttgtgtctttgtccactttgtgctgctgtaacacctgagactaggttgtttataaagaatagaagaaatttattctctaacagctctagaggctgtaagtccaaatcatggcaccagcatttggtctggtgagggccttcttgctgtgtcctcacatggcataaggcagaaggacaaaaaggaatgaactttccttcagaaggccaggaaagaggttaacccactcccacaagcctttttatagcgacatgaattcattcctgatggtggatccctcacaacctaaacactttcccaaagaccccaccacccaacactgttgcactggggaataagtttccaacacatgaattttggagggacaaaaacattcaagccacagcactggcaaccactgatctgtcccctgtctttctaattattatttcaagaatgtcatataaatggaatctatggtatataaccttttgagttttgtttaacctaccatgattcccctgagatccatccaggttgttttgtatattaatatgttattcctttttattgctgggcagtatcccatggtatagaggtaccagagtttatttgttgaaggacatttggatgatttccaggttggggctattatacataaaactcgctatgtacattcatgtataggtttttgtgtgaacagagttttaatttctctgggataattgcacttacaaatgcagttgttggtttgcatggtagttgcagatatactcttataagagactgtcaaactgttttccaaagtggctgtaccattttactagtaggacttttaaagtagcgtgtgtgtgtgtgtatgtattttttttgaggtatggtctgggtctgctgcccaggttggagtgcagtggcttgatcacagatcactgcaacttctacctcctggctaaagcaatcctcctgcctcagcctcccaagtagctaggactacaggtgcgtacctccatgcatggctaatttttgcttttctgtttttgtagagactgggtttcgtcatgttgctcaggctggtcttgaacccctgagctcaagcaatcctcccacctcagcctcccaaagtgctgggactacaggcatgagccaccacgcctggcctttatatgtatatttttgatcatagtaacatcagtatgcaattaaagagtaataatatgtatgtaaaataaagacacgaatatttattcaactctagacaacgtttgatgccataatgggtttaaaataactctgggagcctgggaatctagtctctagattggaaaccactgaactgggtattttattattaaaaacaataatcattattattttttccattgtaataacatgtaaaaaaacatatttcccatatgctcagtggagaaaatttggaaataaggaaagtagcaagaagaagtggggggaaagaggcacccataattctattacccagagtcaaaaacatcttttaacactttttctgtgcattaaaaacaaaaaaagaaaattatacctccatcatttctggtgtgacctgcattgtgacagcacaatgttggccagttatggtgcagaaaacagtgctacccctgggagcctggagtgtggtgggagatagctccaatagtggcaggtgctgtgcaggaagaggctcgtgtgaaagtactggagggctgccatggggcacggtgatggggacatggggccatgccgtctgcacaaggccaagtggaagagcagatttttcacggtaaatgtaggcagaccctttttttttcctggttgtctaacctattattgtagaagtgctcatatacattcttttccatctgtgctttggcaggatgacatcattgatgatgttgacagctttcttgctgcagcagagaccctgaaggaaagaggtgcatataagatctttgtgatggcaactcatggcttgttgtcttctgacgccccccggcggattgaagagtctgccattgatgaggtaacagggtctgggtgtgtgtgggtacagctgcctgggcttttggcacatcttgatctttagttacagagagtcaggacaagactgagatcttttgtggctgagaaacgattcaagggctgggtgcagtggttcacgcctgtaatcccagcactttgggaggccgaggcaggtggattacctgaggtcaggagttggagaccagcctggccaacagggtgaaaccccgtctctactaaaaatacaaaaattagccgggcgtggtggcacacacctgtaatcccagctacttgggaggctgaggcaagagaatcactggaacccagagggcagtggctgcagtgagccgagattgtgccactgcattccagcctgggtgacagaatgagactcttgtctcaaataataataataataataataataataataatgtgtacaactcattggtttttagaatgttcagagttgtgcagtcattaccatagttggttttagaacattttcttcttcctagaaaggaaccccatacccattagctgtcacttcacattttctctcactgccattagtccctgggaaccactaatctgctttctgtctctctagatttgcctgttctggacatttcatataaatgagattatacaatgtgtggtcttttgtgtctggctgtcttcactcaacataatattttcaaggttcatccatgttggagcatgaatcaatacttcattttatgatcaaataatgctgtgttacatggatagtccacattttgtctctctcttcgtatttcatgttgatagaaaaaattttttttctactttttaacttatgaatggtgctgcagtaaacatttgtgtacaagtttttgtgtggacatgtgttttctcttctcttggatacgtacctaggtttagaactgccaggtcatacagtaacttcatgtttaaactttcaaggagctgccagactgtttttcaaagcagctgcgccattttacattcccacagccgtgagttgggggggggctccagtttctctgcatccctccagtacttgttattatcttttttgccatacctatcctagtgggtgtgaggttatcaaatcttaacctaagaaacacaggctgggcgcggtggctcacgcctgtaatcccagcactttgggaggccgaggccggtggatcatgaggtcaggaggtcgagaccatcctggctaacgcggtgaaaccccgtctctactaaaaatacaaaaaaattacttgagcgtggtggcgggcgcctgtcgtcccagcttacttgggaggctgaagcaggagaatggcatgaacccaggaggcagagcttgcagtgagctgagatggcatcactgcactccaggctgagcgacagagcaagactccgtctaaaaataaataaataaataaataattgaaacattgacttgagacatagatccactgtgttttcctgtcgtggcaagcctcagatttgagaagctgtcacatttccagatcaaaccatgaagctacttggctttctgatgctgtggttttttttcttttgcttcacaggtggtggtcaccaatacaattccacatgaagtccagaagctccagtgccccaagattaaaactgtggatatcagcatgatcctttcagaggcgatccgtcggatccacaatggggagtccatgtcctaccttttcagaaacataggcttagatgactgagttttcctttaggaaaactcccgagggccaaactggaaacataagagtgactgctcggtgggatggatttcacaggaaccgtcatgcttgttcctccctctcccctgtaacctcacttcttattgattcctaagaagatagaccaactttttatgtcggtttgggtgtttgtgagtttggggagcaatttttataaaagaaaaactttattctcctcttttgaaaaggtaagacctcgttttagttgtaactgtttaaaaaataacacttggaataagatttgtaagctcacaaagccttcttccaaagttgcttgagccaagtgcttaaaaagttaataaaataaaatgatctgtatgatacctgcaattgaaaagccgaaaagattatactgtcaagtccagtaaatgacatttttagagatgcttttgtagacaagcatatggaatatgtgattgtatttattttctgcaactaaaaaaggaataaaaacttgtgtttgtgtgtttttctaaaactttgtgttttggcaatcgttttataactaaaataaaatgaaagctaaatctacacgctgtgaatgttgaaatgttcatcagcttgttttctcttctgcagctttgtgggggatgcagtagcctctcagagatgtgatatcctctgttctgacaatttgtccaaggccctgaaagttcccgatgtgtagtcatttgattgaggagggggaggagctggaatctcagcatgcaaggccacaggcagcagagaagccagtggtcaccatctgccattggtcttggtgtggctttgcctctcttccgtggctggctgttctccatcatgctctagggagatgagatgctgggggatgcatcccaaagggcaagtgacatgacccttgttgctgtcaagggtctaatatcatctgtcttttttttttttttttttttttttttgagacggagtctcgctctgtcgcccaggctggagtgcagtggcaggatctcggctcactgcaagctccgcctcccgggttcacgccattctcctgcctcagcctcccaagtagctgggactacaggcgcccgccactacgcccggctaattttttgtatttttagtagagacggggtttcaccgttttagccgggatggtctcaatctcctgacctcgtgatccgcccgcctcggcctcccaaagtgctgggattacaggcgtgagccactgcgcccggcctcatctgtctttagagtttaggaccctgagcttccccagagtccattggagtggcctcccctggagcactggcactggggtttacacacccctgtcctcccactcagcctgacttatggaggaatatgtagacttgctcataaaaactaatttttcttcctccccaaacaccttaaacctttgctttctgcttgtctgtgttagaatctggaataaaatagtttatttagcacaaaattaggatcagtcaccagccacgctggccttctctgtgctccacagagagcagcgtggcccgagggcttgccccagtaggccagggccttgtttgtgcagaagcaccaagggctctgcttctggaagctgcccaagtgttccgtgggctcttgcacactcagcagtgccacccctcacacctagtttacttgaggaaacagctttgagggaaaggtgttcattctctccccaagtttccaaatccagttaatgatagagctatttactttgaagaagtgtccttgctttctgtgaacctgtccctagaaatggggcctctcgatcttcggaatgaattggcttagggcatgggatggtagctggtggcttctttgccagtgcagctctgtcagttgcaggctggagaccacccagtttccacatttggaagaagagctttgggagcaaggtgtcaccacccatgagagtggagcctgcctgtggtgccaggacctcccactgttgctgtgaaatgagctgaagaggcttcagtaaatctcacagctccagcctctgatgggtttgggttttttcttaccttctgccgtttggatgctgcctaaccatttgctactatagatgacggttgaagttgccatgtggtttggctttataacaagtgacaggcacttcctgaacagccatggggcatcccctggggtggctgtgctggcacagtggccctcccatggtttgggaatggtggtgctgcactagcacggaggacaggttctgctctgggttccttggagatgcagtgggctctcaagctccttcagtgggaggtttcctcctgccactgtgtccagtgagctttgacctctggtttttcttggcatgtcatccttcatgaagaaaagtcatatttacagaagtgaatggaaacatgttttatgggagtgttttcctctgggtaatgaacttggctaaagctaggatccttcacacccacagagactcgaaggtctgccctgagttggctctggaagaacatgaagatgagtgctgggaggagccacgggtggggcatgtgccaggggatggctgacagggctgaggcccaggaaagacaactggcagatgatggtggaggagagtggagtgccacgtcctggcccgccgggctggggcaggaggatggaagccttcaaggggcaagtcaggttctgtggtgtggtggggagtgctgggggactctcagggcttcaggagtgcccagtaaggacacccaaacccctcagccatcctcttccctgtctagaggaggccccagatacagtttctccgtgtgttgtaggcttttctttggccagagaagccatttaccctctagactactgtctttgctagagacagagacaatctctgtggccagagataatggggaagtgaacccagaaattctatgacagaaaacaggctgatcgtttccagttctgactgtgacgtcatcacttgacagactcgtggttaaagcaatgctctcgaggcatcaagaacacaggatgccactaaagggcatgagtggatggacacataccagttccaccacactgtgtgccagggacattaatcttttggctctcactgtttattacctctaaggctgaggagggaggatcgcttgaacctgggagatggaggttgcagtgagccgagatcgtgccactgcactccaacctgggcaacagagcaagaccccatctcaaaaaaaagttgtagaattcaacacctacttttaacagatcaaccagacaaaagatcaataaggaaagagatcacaccgctgtactccatgctggtgacagagtgagactctatctcaagaaaaaaaagtctgaaatgctaaattttatgttgtatgtattgtgtactttataaaacattgttggaagaaattaaagaagagctaaataggaagacatcccacgatcacaggttggaagtcttaatatcgttaagatgcaatactccaaagcaacctacagattcagtgtgaatatctatcaaaatcccaatggcattttttagcagctatagaaaagcccatcctaaaattcatatgcaatcaccaagggcctcaaatagccaaatcagtcttgaaaaagaacaaagtttgaggacttgcacttcttgatttcagaacttaactacaaagctataccaatcaaaaacagtgtagttctggcataaggagaggcatataagccaatgaagtagaatcaagagttcagaaataaatactatagtcaattgattttcaacaaaggtgccaagatctcagcaggaaaaagaacggtgattttggggggttctttttcattttttgttttgttttgagacagagtctcactctgttgcccaggctgtagtgcagtggcgcgatcttgactcactggcactatctcggctcactgcaacctctgcctcccgggttcaagcaattcttgtacctcagccttccgagtagctgggactacaggcatgcaccaccacgcctggctaatttttgtatttttagtaaagacggggttttgccatgttggccaggctggtctcgaaatcctgacctcaagtgatccaccccgctcagcctcccaaagtgcaggaattacaggtgtgagccactgcatccagccaagaatggtgtttttaacaaatggtactaggacaactaaaaatccatacacaaagaatgaagggctaaaactataaaacttttagaataaaacacagggataaatcttcatgaccttcgggttggcaaaggattcttagatatgacaccaaaagcacaagcaacaaaataaataatagataactggatttcatcaaattaaaacttttgggcaccaaaggacactatcaagatagtgtaaagacaatctaaaagtagaagaaaatattttcaaattatatatctgataaaggtcttattcaggatatataaatgtacaattctacaacaaacagataaaaaaccaatttattttttgagacaagttttggctctgtcacccaggctggagtgcagtggcatgatctaagttcactgcagtctcgacctcctgggttcaagcaatcctcttacctcagcgtcctgaggagctgggactacaggcatgtgccaccatgcccagctaattttttgtattttttgtagtaatggggtttcaccatgttgcccaggctggtcttgaactcatgagctcaagcaatctgcccacttcagcttcccaaagtgctgggattacaggtgtaagccactgcacctggccaaaaaaaaaatacatatatatatatatgtttgttttttttttgagacagagtctcgctctgttgcccaggctggagtgcattggcgtgatcttggctcactgcaacctctgcctcctgggttcaagcgattctgctgcctcagccccctgagtagctaggattacaggcatgcactaccacgcccagccaatttttgtatttttagtagagacggggtttcaccatgttggtcaggctggtctcgaactcctgaccttgtgatctgcctgcctcggcctcccaaagtgctgggattacaggagtgagccaccgcgcctggcccaaaaacatgttttaaatgggatttgaataggcattcccacaaagaaagatatacaaaaagatatacaggcttggcatggtggctcatgcctgtaatcccagcattttgagaggctatgggtgaatcacttgatgcccagaattcgagaccaacctggccaacgtggaaaagcccggtctctactaaaaatacaaaaattagccaagcatggtggtgcacgcctgtaattcaagctactcaatggctgagacacaagaatcgcttgaacccaggaggcagaggttgtagtgagctgagattatgccaagacacgacaacagagtgagactcagtctcaaaaaaaaaaaaaaaaaaaaaagaacaaaaagatatacaggcattcatacaaaaaatatatctaaatggaaagatgctcaacatcattagtcattatagatagtacaaacaaaaaccacaatgagttacaacttcatacccatttgaatggttatgctacaaaacaaacaaaaccagaaataacaagtgttggcaccacttgcagtgttgcacacctgtagtcccaactactcaggaggctgaggtgggaggattacttgagcccaggagtctgagaccagcctgggcaacatagtgagaccctgccttgtaaaacaaacaaacaaacaaaaacaagtattggcaagaatatggaaaaattggagccttcgtacatacactgctggtggaaaggtaaaatgatgcagctgctgtggaaaacagtctggcggttcctcaaaaagttaaacataaaattaccagatgacccagcaattctgctcctgggtatattccaaaaaaaattacaaacagatacccaaataagtacatggacatacatgttcagatgcactattcacaatcaccaaattgtggaatctcaaatgtccatcaatggatgaataaacaaatcttagtatttaatgcctgtaatcctagtactttgagaggccaacacgggcagatcacttgaggtcaggagtttgaaaccagcctagacaacatggttgaaacctcatctctaccaaaaaaaaaaaaaaaaaattagccaggtgtggtggcaccaacctgtagttccagctacttgggaggctgaaatgggagaatcacttgaacctgggaggcggaggttgcagtgagccaagatagcaccactgcactccagcctgagcaacagagtgagaccctgtctcaaaaaaacaaaacaaaacaaaacaaaaaacagtatttacatagaataaaaaggaatagattactgtatgagttacaacgtgcacaagcttctaaaacattatgctaagtgaaattaacctgacacagaaggtcacatattgtgtgattccatttatataaaatatccagaatagccaaatccataaaaacagaaagcatatatgtagttatcaggggatgagtagatagatatgtagctgatgtgtagttatccagggcagtggtccccagtctttttggcaccagaggctggttttatggaagacgacttttccacagattggggcaaggggttggggatggtttggggatgaaactgctccacctcaggtatcaggcattagattctcataaggagtgtgcaacctggatccctcgcatgcacagttcacaatagggttcttgctcctatgagaatctaatgctgccactgatctgacaggaggtggagctcaggcagtaatgatggcttgcctgccgctcacctcctgctgtgcggcccgtggtcctgggggttggggacccctgatccaggggatagagtgggttatagggagaaacttcttttcttttttttttttgagatagagttttgctctgttgcccaggctggagtgcagtggtacagtctaggctcactgcaacctctgcctcctgggttcaagcaattctcctgcctcagcctcccaagtaactgggatgacaggagcatgctaccacaactggctaattttttatatttttagtagagacagggtttcaccatagtggccaggctggtctcaaactcctgacctcgtgatctgcccacctcaggctcccaaagtgctgggattacaggtgtgagtcaccgcacctagccagggagaaacttcttaataggcacaggattttctcttggagtgacagaaatgttttggaactagatagaggtggtgagtgcacaacattgtgaatgcactaaatgccactaaattactcactttttattttattatttagtttttgagacagggtctcactgtcacccaggttggagtgcagtgatgcaatcacagctcgctgcagcctccacctcccaggctcaagcgatcctccctcctcagcctcccgagtagctgggaccacaggcatgtgccaccacgcccagctaagttttgtatttttagtagagacagggttttgtcatattgtccggcctggtctcaaattcctgggctcaagtgatcctcccgcctcagcttcccaaagtgctgggattataggtgtcagccacagcgcctgactaaattattcactttaaaatgttaattttatgttttgtgaatttcttcttagtaaatttcagttccacatgtaaaaagcttgggagttgaaactccatcctacaacaagtaaaaagctcaacaaactgaaaaatcaactctactttgttagagccatatgagaagtgaggtcacagggcaaaccactgctcccataatcagagacagaaatgcaaacattgagaacaatgtacagaagtctttataggaaccggtgccagagttaggaaacctgaactgtaatcaacaaattgttagaggctaggtgagaacaagtctgagagttaaaaacttcagggggactccctcatatgaggaccccatacttttgtgaattttaccttctcaagaagaatccccttgagcttccagcagggagacggaaataggaatcattctgaaagcttcagagcactgtgctcctcttgacaaactctgccctcaggagaagctagttaaccagagcctaacattctggggttttatcagagcctaactgaactaggagaagggtaaaacctaattctagtcagctctaactttccacgtgggagaagagaaatactcaactaaagctcaccctagccaaccatgtgggagaaggatagtacccaatcccagcctactctcgccatcctttcctacctaagggtagagaagaaaatctgagaaaagctcggtgacattcacagtccagtggcacagggtcatcagaaaagacctaattgtaggacctccccctacacctcaccaccacatcactaaaggcctatttacgtagcagttccttttacccagtacattacttccagctatcaagaaaaaaattacagggcatgttaaaaagcaaagaacagttcaaagagacagagcaagcattagaaccagacctggcacaagggatgctgaaattatcagatagggaattttttttttttttttttttgagacagagtctcactctgtcacccaggttggagtgcagtggcgtgatctcggctcactgcaacctctgcctcctgggttcaaatgattcttgtgcctcagcctcccgaatagctgggattgcaggcgtgtaccactatgcccagttaatttttgtatttttagtagagatggggtttcaccaagttgcccaggctgatcttgaactcctggcctcatgtgatctgcccacctctgccacccaaagtgctgggattacaggtgtgagtcactgtgtctggccagacatggaatttttttttttttttttttagacagggtcttgctctgtcacccaggctgaagtgcagtggcatgatctcggctcaccgcagcatccgcctcccaggttcaagtgattctcctgccttagcttcctgagtagccgggattataagtgtgcgacaccatgccgggctaatttttgtatttttagtagagacaggtttcaccatgttggccaagctggtctcgaatgcctgacctcaggtgatcttctgcccgactcagcatcccaaagtgttgggattacaggcctgagccaccatgcccggccaaggaatttaaaacaactaactatgattaaaatgccaagggttctcgttaagcagacagcatgcaagaacagacgggcaatgaaagcagaaaggtggaaatcttaagaacaataaaaaaaatgctacagataaaaacactgtaacagaaatgaagaatgcctttgatagacgtatgagtagtctgaacatgactaagcagagaatctctgagatttagaatatcttcttttttttcttttgagatggagtctcactctgtcacccaggctggagtgcagcggcacgatctcggctcgctgcaatctccgcctcccaggctcaagcaattctcgcacctcagcttcccaagtagctgggattacagacgcgcgctatcacgcccagctgatttttgtatttttagtagagacagggtttctccatgttggtcaggctggtctcgaactcccgacctcaggtgatccgcccacctcagcctcccaaagtgctggaattacaggtgtgagccacagcgcctggccttgctttaggatatcttaatagaaacctccaaaactgagaagcaaagagaacaaagacaaaaaaaaaaaaaaaaaaaaaaacaccagaatatgtggagcaattacaaaaggtgtaacatacatgtaaatgggaatagcagaaggaaaagagagacaggaagagaagaaatattggactgcaagtttcctcaaatcagtgtcagacaccaaaccacagatccaagaaggtcaaagaacactgagcaggataaatgacaaatgaaacgaaacaaaaactctgcacataagtgtgacattttcaaactacaggaaatcaaagataaaggaaaaatcctgaaagaagtcagaggaaaagaaagaaatctgaaagaagtcagaggaaaaaatcatgttacctatagagacgcaaagataaaaattacatgtgtctcctcagaaatcatgcaagaaggaagagtggagtgaaatatttgagtgttgagagaaaaacactaccaacctagaattctgtacgctgtgaaaatatccttcaaatttgaaggagaaatactttctcggacaaacaaaaattgagagaatttattgccagtagacctgtcttgtaataaataaattcttttttttctttttcttttttttgagacagggtcacactactctgttgcccaggctagagtgcagtggcacgatcttggctcactgcagcttccgcctcctgggctcaaggatccttccacctcagcctcctgaatagctgagactacaggcacttgccacggcgcctggctaattttttttgtattttttgtggagacagggtttctccgtgttgcccaggttggtctcaaactcctgtgctcaagcaatccacccgtcttggcctcccaaagtgctgggattataggtgtaaaccaccgtgcctggccatcaatttttttaaggaaaggaggaaaacaatacagatcagaaatttggatctacataaagaaagaaagaacatgaaagaaggaataagttcacatgacttgagcttgtagctatgtcttctgcacagattgggtaatggaacactaaatttttttttgaggggggacggagtctggctctgtccccccaggctggagtgcagtggcgcaatctcggctgactgcaagctccgtttcctgggttcacgccattctcctgcctcagcctcccgagtagctgggacaacaggcacctgccaccacccccagctaatttttttgtatttttagtagagacagggtttcaccatgttagccaggatggtctcgatctcctgaccttgtgatctgcccacctcggccgatggaacactaaatttttatacttgaaaatgacagcctaggagaatcgcgtgaacctgggaggcagaggttgcagtgagctgagactgcaccattgcactctagcctggggaacaagaacgaaacttcgtccccaaaaaaaaacaaaatcaaaatcaaaaacaaaacaaaacaacaacaaaataaaacacaatagagagcctagaaatatacccacataaatatagtcaattgatcttctacaaaagagaaaaggtagtacaatggagaaaagtgtttctaacaaatggtgctggaacaactggacatccacatacaaaaaaaaaagatgaaccatagaccttacacttttcacaaaagttaactcaaaatggacctaaatgtaaaacacaaattgtaaaacttttggaagacaacataggagaaaatctagatgaatttggatttggtgatgcttttcagatacaacatcaaagccacaactgataaaggaaagaattgataagctggacctcataaatttaaacatttccgatccgcagccgggcatggtggctgatgcctgtaatcccagcactttgggaggctgaggtgggtggatcacctgagctcaggagtttgagatcagcctgggcaacaaggaaaaacactgtctctaccaaagatatgaaaaaaaaaaattagctgggcatggtggtgcatgcctgtggtcccagctacctaggggtgctgatgtgggaggatggcttcagctagggaggaagaggttacagtgagccgagattgagccactgcacttcaaccctggtgacagagtgagaccccatctcaaaaaaaaaaaaaaaaaaattctgctctgcaaaagacagtgtcaagagaatgaaaagacacagactgggagaaaatagttcccaaagacatatctgataaagaagtgttgttcaaaatatagaaagaactggccacgtgctgcggctcatgcctgtaatcccagcactttgggaggccgaggcaggcagatcacgaggtcaggagatcgagaccatcctggctaacacggtgaaaccccatctctactgaaaatataaaaaattagctgggcgtggtggcaggcgcctgtagtcccagctacttgggaggctgaggtagaaggattgcttgagcccaggaggtgcaggttgcagtgagctgagatcacatcactgcactccagcctgggcaacagagcaggaccctgtcaaaaaaccaaaacaacaataacaaagcaaaagaaaaaaaattaaataagaaaacaattttaaaatgtgtgaaagatctgatcagacatatcatcgaataaaatataaagatggcagataagcatgtgagatgctcaacattatatgtcatcatggaattgcaaattcaaacaacagagagacaccaccgcaagcccattagagtggccaaaatccagaacactgacaacgccaaatgctggggaggatgtggagcaacaggaactctcattcattgctggtgggaatgcaaaatggtatagctactttgttgttgttgttgttgttgttgttgttttgagacagagtctcactctgtagcccaggctgaagtgcagtggcacgatcttgctcattgctacctctgcctcccgggtcctggttcaagcaattctgcctcagcgtcctgagtagctgggattacaggcatgtgccaccatgcccagctaatttttgtatttttagtagagaagaggtttcaccatcttggccaggctggtctccaactcccgacctcaggtgatccacctgccttggcctcccaaagtgctgggattacaggagtgagccaccgcaccggcctgttgttttttgtttgtttgtttgttttttgagacggagtcttgctctgtcgcccaggctggaatgcagtggcgcaatctcagctcactgcaacctccaccttctggattcaaatgattcttgtgcctcagtctcctgagtaactacgactacaggctcgtgccccaggcccagctaatttttgtatttttagtagagacagggtttctccatgttgatcaggccggtcttaaactcctgacctcaggtgatcctcccacttcagcctcccaaagtgctgggattacaggcgtgagccaccgcgcctggccggtatagctactttggaagacagtttggaagtttcttacaaatctaaatgtgctttgatgcaagtatatttgaatccctttccatctgataactgagcaaaataataattttttaaaaagcataaaaactaagcttacacttaccatatgattcagcagttactcttgagtatttattcaaaggagttgaaaacttacgtccacacaaaaacctgtgcatggatgtttactcattatgaattcagctttattcataattaccaaaactttggtagatgtccttaagtaggtgaatgaataaataaatcatagtatctagataatggaatattattcagtgctaaaaagaaatgagctaccaagccatgaacacatggaggaaacagaaatacagatgactaagtcaaagaagccttttgaaaaggctacaaagtgtttgattacagctatatgacattttggaaaaggcaaaaccgtgggaacagaaaatgatcagtggttgccaagggttagggaggagagagggaaggatagggagaatgcaggcgacttttagggcagtgaaactactctgtatgacattatagtggtggatgcatgtcagtatatgtttatccaaacacatagaatacaacaccaagcgtgaaccctaatgtaatgtatgtgctttgggagatgtatcaatgcaggctcatcagttgtaacaagcataacaacttttggttggggattttgataatggcagtggctatgcatgtgtgggtcaggatatttctctaccaaggaaggtagacataccttcaacagccaacaattacatgaaaagatgttcaacattactagtccttagggaaatgcaaatcaaaaccacaatgaaatgctacttcacgcctactaggacggctatcataataatgtcaaaatgcagcctgggcaacacagtgaaactccatctctaccagaaatacaaaaattagctgcgtgtgtgacatgcacgtgtggtcccagctacttggtgggctgaggcaagaggatcccttgagcccaggaggcagaagttgcagtgagtccagatcgtgccactgcactccagcctgggctgtaaagtaaaactctgactgaaaaaaaaaatgtaaaaatggacaataacaagtgttcatgagaatgtggagaaactgggggtctagtgcgttgctggtgggaatgtaaaatggtgcagctcttctggaagacagtttggccaatcctcaaagtttaacatagaataccacccagcaattccactcataaatatatgcccaaaggaattgaaagtagggcttctttcaaagtactattagaagtaaaaaaagaaaaaaattggctgggtgaggtggctcacatccgtaattccagcactgtgggaggctggggtggtggagcacttggggataggagtttgagaccagcctggccaacctgacaaaaccctgtctctactcaaaatacagaatttagcctgtaatcccagccacttgggagtctgaggcatgagaatcacctgagcccgggaggtggaggttggttgctgtgagcctagactgcgctcctgcactccagcctaggtgacagagtgagattctgtctcaaaaacaaaacaaaacaaaaacaaatgtttttaattttaaaaaattttaaaaaggaagcagggtctcaaagagatactttcacctcaatgttcatagcaactttattcacaatagacaaaaggtagaaaaaactcagatgtccatccaaccgacgaatggataaacgaactatggcatacacatacagttgacaattattcagtgagaagacagagcgaagcgccgacatgcactacaacatggatgaaccgtgaaaacatcctcagcgaaagcactcagacacaaaagaccatgtatcgtgtgatgccacttacataatacacctgttttggaaaaatttcccaaccgggttttacctttgctctcacactgcaacaaacgcagaagatttctgtgaccaaatgtggggacatctccccatcaatagacaagcaatcagttctgcagtagacaccagcaaggtgccctccaattcaattccaacactatctacccagggtgagggctcagttcccaaggctgactcttcctttcccaccagtccagacctctggaacttctgacccacaagcttcaagttgggttcccacgatcgaccccctttggattcaattaatttgctagagcggctcacagaactcagggaaacacttacttaggaggcttactggtttattgtgaagggcattttaaaggatacaaagaaacagccagatgaagagagacacagggtgacatctggaagggtcctgagcacaggagcttctgttcctgcagttggggagtgccaccctcccaggacagggatgagttctttttcaccttcctgccaccctcccaggacagggatgagttctttttcaccttcctgccaccctcccaggacagggatgagttctttttcaccttcctgcctgcctccacgtgttcagccatctggcagctctctggacctagtcctcctgggttttatgaaagcttcttgagatcagcattccttcccccagggtgtggggcaggaccctctctggaatgaggatgatgtgacccacaattagaaagacaggggaagattagaggccgccttggggcaggtgagaggaggcaggagaaggtcagagagattctgtttcctgaggcctgacatgccagatgtgataacaacagaatgcagcaagggctgtggagttgagtcaggaacccagggtggaaacctgtgtgtatacataacaccacgacaccagagaaggcaactcctacatacctatgataccacaacaccagagaaggcaaatccacaaagagggaaagtagattggtggctgccagaggcttggggagggggaatgaagatgatgcttaatttgtacaaggtttcattggagaggatgaaaaatgctggaataggctgggcgcagtggctcatgcctgtaatcccagcactctgggaggctgaggttggtggatcacctgaggtcaggagttcaagaccagcctgaccaacacggtgaaaccccgtctctattaaaaatacaaaaattagccaggcgtggtggtgcgtgcctgttattccagctactcgggaggctgaggcaggagaattgcttgaacccaggaggcaaatgttgcagtgagtcgagattgcgccactgcactccagtctgggtgacaaagcaaaactctgtctcagaaaaaaaaaaaagaaaagaaaaatgttggaataggtaatggcgatgggtgcatagtgttgtgaaggtggtggaaaccacagactggtgtactttaaggggttaaaatgatggattttatgttaaatgcattctccctcaataatgataaaaaaagaataggtttctgggattgaagggcctcaggggcctcagcatctgaagattcctcagttgcctgggctccttggacctcttgcagtgatgtggcaagggtagaccctgtgccggtcactggaggagcggggtgacgggtgggtgggggcagatactactgtgtcgtgtggcagcacagccactagcccagcagggccagggatgcacagaagagggaggagccaaggaaggcttcagagaggcagtgatgtctcagtaccgtcttgaaggatgagtagcagttcaccaagcagactgagaggtagggggacttgaggacacccagggaggaactgagggcagcagaagatggagctgggtcgggggagggccaggttccagggcccctggtgccgagcccaaggccttgcacttgatctctggagcagtaaaggctgttgaaggtaagtttgaaacaggagtgtcatgtccagggttaggcttttagggtgttctgacatactgtgcgtggtgagtagattcaaaaggataagactggaggccagggatcagtccctccccacctgtgctggacgcctggtctgcatcggttccattacctcccagcagcccttcccggctgccttcacttcccttccactctgctgctctgccggctgagctcagggtcctcccatccaggtgcccactcaaccactcccttcgagggcctgaggcttaacagtccaacctccatcactccctgcacaaacccaacctcacccaaagctcagtgggcttggctgggaccccaggggaggaggggggtcattccttcccactgaatacctgtcacgagccatgctgggtggtggagtttaatgttaaaagggcagattcgagagctggacaatttgggttcaaagtcctcctctgtctcttagttgctgtgtgactttgagcaagttcctctgtttctctgtgcctcggattttccatccctcaaggagttgggagagttgagggtggacgatgcgtgggcacatggtgactgctcggtaggtgtctgtaaccatggtaaagatgaagctgtgggctggcccctggggtcccagccgagcccactgagctttggggagggtgggtttgggtggggagtgatggagggtggactctcaaacctgaagccctcaaggggagtggtcaagagggtacctggatgagagaatgcagcgctcggccagcagagcagcggagtggagggaagtgaaggccgcctggaagggctgcggggaggtgaccaaccaatgcagatgcaggtacccagcacaggtgggcaggtgagcattcaggaaatggttgtctgggacccaccacccttcacaaagcacctggcaacactctccttgagcctctgtatcagtggaaggaaactgcttgacctggctggtgaggggagcccaggcagggtcgggggcacccctaggggccagcttgctggtctaaaccaaggccaaggccagaggtcttacaaaaaagcccagcccacaccaaagcataaaaagtgataacttgggccggacacagtggcttacgcctgtaatcccagcactttggaaggctgcttgagcccaggagtttgacaacagcctgggcaacatggtgagaccctgtcgctataaaaaaatacccacaaaactttgctggctatggtggtgcatgcctgtagtcccagctactcaggaggctgaggtaggaggatcccttgagcccaggaggctgagactgcagtgagctgtgattgtaccactgcactccagcctgggcaatagagccagacattgtctcaaaaaaataaaataaaataaagtgataattctcctttctcctctccttagcagtttggtgtgtgtccttcaaaacactgtggctgttcagccccttacattatatataatgagaggataaacatggatatgggtctatattctctagcttgcttttttcacttacaagtgtatcatccttccatgccattatataaagccacctcatctttttaatggtcatggtgttccatggtttggaggtctcataattcactcaccaccttctctgggtggttatgtaggaaatttctaaactttttggctgccctgagcacgcttgcccttgtagcttaggactcttggggagtttctccatcaggacagacaagcagacaatacttagcaggaataaatgatcagtcttgtgcttattgcaaaagcaggagcaacagataagctggaactagacttggcaggcaggcagagagaggccctggagggattcgctgcaagctgccgcagatgaccgtgggctcccttcatgggctcccttcactcatgtgcagtccgttccagtgctgcccagctcatcacatggttggtcatgccttggtcacaattctgaagcacttaagaaagaaactcataagctcatagatgccccacacacaagatacaaatggctccagtcgtcctgcttaggctctgctgacccctccacatcccgttcctggttctcatgagtctgagggacttcttccggggatggaagaggcttcaaggggtgtggtacggatgacttctcagctaggacggtcttcatgtttcttggggtgagtgaataggtgatcccgttgggtcaggtggggtgggaatgtgggtgtgactgggcttcgggtggcgtttcttctcccgcagacatggctgggcttgtttggtacttctccctccatgtcctccgctgccaccctcctcctgtccccgtccttcaggacagaaccagcaaatcagtctcagccccttaagagcacctttactggtgctttctttccctaggattttttttctcttttttcatttttttccatttaaactcagtggcaaaaatcccaaggacttttgatccaaaggcggcagttatcactaagtggtttatttccttctaagacctagccaacggtctcagagccaatgctgctggtacaactactctattaatgggatagttttggtaagtctggatcctcccagctgggtcctcctgatcagtgcaaagcagccttttgttttaaaacacattgcaagcaatggcttgggaagtaaacaccatctgaggctcgctggccagaggcaaggggagacggcaggcagttgagcctgcctgagggttctctcagcagtgacttcctttttcccttccttcttctgcctagtcctgtatgtgaggactattaattgttttttgttgttgttgttgtttgttttgtgagatggagtctccctctgttgcccaggctggactgcaatggcgcagtcttggctcactgcaatctctacctcctgagttcaagcaattctcctgcctcagcctcccaagtagctgggattacaggtgcgtaccaccatgtctggctaatttttgtatttttagtagagacgaggttttgccatgttggccaggctggtctcaaactcctgatctcaggtgatccacccgccttggcctcccaaaggcatgagcctcccaagggcatgagccactgctcctggccgaggggattaatttttacccgcacctcagggttattgagtaacaggctggctgggtttgcaggccagcgtgttcctggtggcagccgctcactcattaacacttctggaagtgctgcatgtctggttaaactgcaaatgctttgcaaagtcacgagtcatgtcactgagcagaggcgtgagactgccggccagccctgctgtgtacactgatagaattagtgagcgagcgtcccactctgatggaatccagatggaactcgtcactgtcactgcggtggagacggtggggccacatctgcactgaatcctactctgcgccttcaatggctgcgtaatggcggatggccatttccttgactaggatgagacattgcctactctgcgtggctgctgtgagcgtgaaatgggatcatgtgcggaacagccacgcatggtccgtgaaatgggatcatgtgcagaacagccacgcatggtccttggtgtgtgacagatattgggtccctctgtggtcccaggcagacattgcccggggtgggggccgaatgcatggtcaagttgaggggcctgggactgtttcacgggtctagaaaaagaaagcagaaacgctggaagcaggactttattgtccgacatggggctgcctctgagcctgggctgtgttggctggacgtgagccataatgcaggtgtccccctcccaagccctgctcagtccactcacagcccgatggccaagggaggacatggctgcccgccacggcagtatcttcagaggtgaggcggttgtccctacgctctatgcttcttatacaaattagatataggtgaagccacccattaagcaacccagcctttctgggactatttgggctgcctccgggtccactaaatgcggttcattttccccaagccccctccgagttcaaggaggctccttcctttcctcctcccacttgcttctcccaggctccctgactcctgcgctctgggatctgcaccccaccatggggtgaggaagctgaactgcatggtgaggcagctgccctgcatgcagccacatcatgggctggagatgccactgtccgcttggtttaatgatcaatgagctccctgccaggaaaccctttctgacctggtttgcccctcagtccctcgggctcatacctagtgcctgcggcaggacagccatggccgccaactccaccagcgacctccacactcccgggacgcagctgagcgtggctgacatcatcgtcatcactgtgtattttgctctgaatgtggccgtgggcatatgggtaaggggacctgtggtggtgttggccaagtgggctctcagggttggtgcttggggtgggaaccggggtccagcatgtccctgtggtgtcagcattggtcccagctggtggcctagtgatccttgtggtcctcctcccagcctggggtagacttgcttggagaccttgaccaagcccgtttctctctttgggtaatggcgtctccatctgcaaagtgaggaggaggaaattctctctaacaggtaactgggcttttgtgctgctgcccagctggagtccttgggtgtggcccatcagcctcctggtcccagtctccatggtgtcagtgactcctgtctgcttgaacaacaggctccccgggattccctggctgcaccccagagctgctggatcagaatccggaggcagggagggccctgggaactgggggtctttattttgaacaagctccctggggatttatgtcctgtggcctagccctagatcataagccggttctttctcccttcataacagtgagaaatgagcagagatctgaccccacacacagattccaggggcagcggggcccctggggacaggctgtttcatgtgcagatggagaaaccgaggctctggccctgcagcaagggaagggctcctctggtctatcgtggaggccttcctgagggaaggtggacacagcctggttcaggtcacctgctccacgcttagcgcctggggatgttgggctccacttcttaagccccagaggtccccagcctggcatccctgagccctgacagtctcctggggagaatgagtaccccttctttttttttttttttttttttaactgagacggagtctagcactgtcacctgggctggagtgcagtggcactatctcggctcactgcaacctccacctcctgggttcaaacaattctgcctcagcctcctgagtagctgggattacaggcgtccactaccacacccaggtaatgttttgtatttttagtagagacagagttttaccgtgttggccaggctagtctcgaactcctgacctcatgatttgcccgcctcggcctcccaaagtgctagaattacaggcgtgagccaccgcgcccggccgagtacccgttcttatcttccataacccctggcctaagcacgaaggcctggcaaacaggagactggtcacgtcccctcagcttcctgggcctcagtgttctgatctgttatatggagacaccacctacctggggtgaggtctgctatcaaggggcccacacaggaccagaccttgctgctgccattggttctacagtggtagcagtggtggtggtggtggcagttgtagcagtggtgattataagagtagcagccgcagtcattaaaattaattatcacaggttggatttcaaaaatctgaaacccaaaatctggaacattttgaacaccaacatgatgctcaaagcaaatgctcattggagcatctcagattttagagttttgggttggggatgttcaactggcaggtattctgtaagtatctccaaatctgaaagagtccgaaatccaaaacttttctggtttcaaatatttcggataacggctcctcaacctgtatgtgattaaatattaactcacaagtagcccagtgctggccatcggcaaagccgagttcaagtctcggctctgctctgtgtacttaagtcacttaatctctgtgggcttcagtttcctcaaacacgcaatgcgggtttctgtgcagcccacatctcagggctgttccaaggagcaagggtccaatggaagtgaaaatctgttgcaaactgtaacgtgctatattcctgtgacagttggtggctagaattcagaggaggaggtgcccacgtggggcagaacagacagtggagggtttctggatgaggggaggtaagggccaggcaagatctgaagagggaaagaggaggggagacaaggctgtcctggctagcacgtctaagaaagatgttctgggcacctgaggccagaccctttgtagcccagtgacttgggccaccagcccttgttgcccatgacccacctctcctagtgagtcagcttgctgtttgcaggctggtgcccctggaagtagggctgtaggagttctgccctgtccctcctagcaggctaggctggcccagctgggagcggctggcaagagagcagtgagcacatccagaaaagatcagaaccagacagggaggatgctggagatgcatcccacagggagaagcagacagagcaagccaggcaggtgcagccctgcaaagatgtttagatggtgggcctgggagagtctggcgggggccggggggaggcctttaaggaagagatgttcctggaggaggggactttgagctgagcctttgcattcattaaagtatctgttaacaagtgactgaaaactgctttcaaatgagctctaagaatataggaaatgtaggccgggcgcagtggctcatgcctgtaatcccagcactttgggaggcctaggcgggtggatcacgaggtcaggagtttgagaccagcctggccagcatggtgaaagcccgtctctacttttgtattattttgtgataatacaaaaattagccaggcgtggtgccaggcgcctgtaatcccagctactcaggaggctgaggcaggagaattgcttgaaaccggaaggcggaggtcgcaatgagctgagatcacgccactgcactccagcatgggcaaaagagtgaaacactgtatcaaaaaaaaaaaaaaaaaaaaaaaaagaattcaggaaatgtaattgtgtccagcaatagaaagggcttcaggtgcagtatgatccagggattcacagcattattaaggatacagctacacctcactttggttctctcagcctccatccatgtgtagctctgtcctaagcccagctcccctcgtgtcctgatgtgaaatgaccagccctgcgattgagcctgagttgaaatccaggctgcaccacttgctagatgggtgtgttttcatctctgagaccatcagtttcctcattggtaacatggcacctgcttcatagagctgttgcgaggactaagaactccacacagatcaagaagttgaagccaactctggcatgggggccttcggggaaccttaaatgggtacatgtggcccccagcaactgccagcagcccccagagccccagatataagaaggcaactggcaatgcccactataggcttgaaagatgagaagggttaggaaaaagcatgggctgtaaacatagatgctttggagttgtgcagtgcacagcgtacacatctggatatggccatcctggccaagactgtgagccttcagactatgctgcctttagtacagcaagatcacggcacacaaagagaaagtggtgggagttggagctggagagaggcaggagccacatcaaaagttctgaactgggtgtggtggtgtccacgtggttcctgctactcaggaagctgagatggggagatcacgtgagcccaggagttcaagacctgcctgggcaacataatgagaccctgtcttaaaaataaaaataaataggccgggcgcggtggctcatgcctgtaatcccagcactttgggaggccgaggtgggcagatcacctgaggtcgggagtccaagaccagcctgaccaacatggaggaaccccatctctactaaaaatacaaaattagccgggcatggtggcacatgcctgtaatcccagctactagggaggctgaggcaggagaatcgcttgaacccgggaggcagaggttgcggtgagccaagatcgtgccattgcactccatcctgggcaacaagagcgaaactctgtctcaaaaataaataaataaataaataaataaataaataaataaataaataacaaatagataaagctttgaatggtgagtacatacaatgaagcctaatcatcctgagtatagggcagggcaattaaagtcaggaagaaagagacctgcatattgatggatatattttgtgatccagccttatgtatgttctgaaaagaaatacaaaatttgtatctaaatacctgtcctgtgtccctcttttcaaattcttctgttttttcttttttctttctgttttttttttttttttttttttctgttttgagacagagtcttgctctgcagcccaggctggagggcagtggcgccatcttggctcactgcagccttgacttcctggtctcaagtgatcctcccacctcagactctagagtagctgggattacaagcatgcaccaccacgcccagctaattttaaaactttttatagagacagagttccactatgttgcccaggctggtcttgaatccctggcttgagtaaccctccttccttggcctcccaaagtgttgggattacaggcatgagccaccacgcctggatgatttaacttaaatttctcccatccaaatagcactaaagacaggcttgaaaaatccatgtactcactgacccttatctcagcatgctacgtgtactaacccactaaagctcataaaaaccctgtgagggttaggaagccaaggcaggcagatcacatgaggtcaggaatttgagaccagcctggccaacatagtgaaaccccctcctactaaaaacacaaaaaattagccaggtgtggtggtgcgcacctgtaatcccagctactcgggaggctgaggcaggagaaccgctcgaacccgggaggtgaaggttgccgtgagccaagatctgtcactgcattccagccagggtgacggagtgagattctgtctcaaaaaacaaaacaaaacaaaattcatgaaggaagaacttcttaggaccacattacagaggaagaaaccaaggcatacgcgttcagtaacttgccccaggtaacacggccaggaagcagggaagacaggattttactctcagacgttccgactccagaatttttattccacttacatggaggacaaaattctatactccccgtaaaccaaaggcatgtgggaatacgtaggtaaggagctgactgcttctgttctttttataaaagttgagataaaatttacataatatacaattcatcattttaaccattttattttattttattttatttatttattttgagacggagccttgctctgtcaccaggctggagtgcagtggcacgatctcggctcactgcaacctccacctcccgggttcaagcaattctgcctcagcctcccgagtagctgggactacaggcgcctgccaccacgcccagctaatttttgtatttttagtagagacagggtttcaccatgttggccaggatggactcgttctcttgacctcgtgatccacccacctcggcctcccaaagtgctgggattacaggcgtgagccaccgcgccagcccattttaaccattttaaagtgtgcaattcatggcatttagtacatttgcaatgctgcgcaaccattacctgtagctagctccaaaacattttcatcctgtccccatcaaagtcaagcaccgttcttcctgcctcccagcccctggcaacaactcatctgctttctgtctctataaatttgcctgttctggacttttcatataaatggaatcatacaattcgtggccttttgtgtctgtctgtgttcatgaagcatcatgttgtcaaggtccatccaagttgggcatgcatcagagcttcattcccaagatatttgttgtttttttccagacaggatttcactctgttgcccaggctgcagtgcagtggcacaatcaccgctcactgcagcatccacctcctgggctcaagagatgctcccacctcagtgtcctaagtagcgggggccacaggtgtgtgccaccaaaccctgcattttttgtagacctggggtctcactatgttgccagtctggtctcaaactgctaggctcaagtgatccgcttacctccgcctcccaatgtgctgggattacaggcatgagctactgcacccaatagaacttcattccttttgaagactgaataatatttctttatataggatataccacattttgtttatttactcatcagtcgacagaaatgtgggttgttttcacttttggctattatgaataatgctgctatgaacattcgtgtacaagtttctgagtggatgtgtgttttcaattcttttggacatatacctaggagtggaacttctgggtcatatggtgattctatgcgtaaccttttgaggagctgccaagccgtttcccattcgacttcccagcagcagtgtgcgggcttccaactcctgtcccttttctcctcttgcagtcctcttgtcgggccagtaggaacacggtgaatggctacttcctggcaggccgggacatgacgtggtggccggtgagtgcaccctgacttctcacacacccccactttgtccgtggggctgtgtctgatctctaggtcacctggcatctgtatctttgagccagtccaattcagtggagcaggccggaggctggcaggaggtccccaagtgaggggcatagggctgagctgctagaaattgtgtaaggggcaggggctatggagtctgaaacttacatccgctccttagctgtgcagctagtcatgggtagaacacacaccctgggctcctcatccgtgaggtggggctaggaccccgcttaggtttgtgaggatgagggagaagctattaggcccaggatggggccggcgcagggagcctgctgctgatgcgtttccctttctctcctccagattggagcctccctcttcgccagcagcgagggctctggcctcttcattggactggcgggctcaggcgcggcaggaggtctggccgtggcaggcttcgagtggaatgtgagtcctggaggactggcggcctgtgggagggccagggcacaggatgtggtcgcagcactggagggggacagctcccagtggctggtgtcagccgatgtccaggtgggctctgtgcagtgctgttcctgggccaaatcgtgtcttcagaataccaaggtgctggatggcacgactggcagggagctgtgggccttgcccagacctagagaggggaaggagccacccaggatctcatggcaagtcaggaggggctgggggaagccaggcctccggatggctcatcccagccatgtctgctttgtctctggagcagagctgtgggagctgcacctgcagtcctcacctgtctctgtccccataggccacgtacgtgctgctggcactggcatgggtgttcgtgcccatctacatctcctcagaggtgagtctactcatggggcctccagctggggggctgggccttggtccaagttggtggtagtaatgggcaggaccaccgtggcctcacatcaggagttggtaaactcttagggctgggtttgctattagcccgactaatatttctatcaacctgctaaggtggatcccgactaatatttctatcaacctgctaaggtggatcccctcagacctcagcctgggtgccgtgttggctggtttccactgccctgagtgctgcatctcaggaataatgtcccatccagctgggcacataggctgtacaactgggccatgcacctggtttgcacacctggcccacacacctgggtagcatacctgggctgtacccctgggctgcgtacctgaatggcacacctgggccgcacaattggctgcaccatcgtcgactctgcccactccttcagccccagccatgcagccactaagtccagtcaactccacttcctggatgtctctcagcctgtccccagctctgcccctcacagccacctccctcatccagcctcatcatagtgcacctggatttgtcataacagcctctaaacttgtccctctgtcccagccacggcccctccaatccattcctcgtctcagccctaaagagccagtctagggatctcagcctgccactcccctgcctgacaccctcggggcgcagccggagcagcccgggattccaggccgggtgctggggctgtaaggggtcagtgcctgggccttgcccttgagaggctcgcagctgctttgtggcggggggagaggcagagtgattgagacaggccctgcctggagccctgggcatcatctggaggatgcttagcccctacccatgtgccttcccagatcgtcaccttacctgagtacattcagaagcgctacgggggccagcggatccgcatgtacctgtctgtcctgtccctgctactgtctgtcttcaccaagatatcggtgagctgcccccggctccctgctggcatagcctggaaacatcgccaatctgtgggcccctcaagaggacctgacatcttctcattcatctctgccttgtttaacagctgggcaaattgaggcccagagaggggcaatgacttgcccagggtcacgcagcgagtctggacaggtagtccagggcccccggggtgtaggctcagcagccagccctagtcagggacagaacacaacctggtgacctctgctttgcctcaggttctagacacagggtgttaggacggttctcggtctgaggtcagttctggggccggcaccggggtgagccacgatctcccactagggggcgccaaaagcccacgtggtcttagccacatctggtctgcactgagctgacctgcctctcaccccaaggctggtgggctccatcactgacacccatccttgggggcctggccctgcccccacgggcatattaagagcaggagcacacctcgaatgtcagggtcaggagaagcatagagctcatcttgtccaagcccctgactttacagagagggaaactaaggcccagagaagggaaagagcttgtcctaaccctcccggtgacctcatggcaacactaggccttctgctctcactccaagtccctgggggcagctagcttcatccagccccaggcttctgaaggggcttgagtcctggggctgcctgattctggctgagagagctgacactagcccctgcgacctccgagcctccctgtgcctggggctcctcccttgtaaggaggggcggcagaccttgtctcctagggctcctgtgagttggtggtagcaatgggcaggaccaccgtgtgagggctgctgtgtctgcgggaagtgctctgtgaggcccagctttccctcagaggcaaatggcctcctgggccctcttcattcagtcctgggactaggaaagcccagaagaggcgtcgatttagtgaagggaatggaggtgcagaggccggagaggtagaggcctcgctggtcagccaggagctgtgggcagggctacctgggaagagggccctaaagggtccatccagagcccccacggggccccggtgggggtctcatgcagcatctgacccgccctctcctctcctggggcatcccctcggcagcctcagcctggcctctatctgcactggtgttgctaggtgactctgaggggattcccagagtgtctcatccttcgtgtgggcaggtctcaggagtggccagcagcaaaccccgtaccgcagtcttcgccagatgcccttggcgtactgtaggaggtttgctttctctgggagccctttagagtccggagggacttggccttggcctgcccttaaggctgagtttagagctttccactcatactcttccttcctctcccacatttcttgatctccaccccacccccatgccagccacccccatgccagccacctccctggaaaccagggatacagaaataaacaagacctggccctggtctgccaggggctcgcactgtggtgagaaatagatggatgcatgggacaggcatgaaactcagaagaggacacagcggggcttgctgggggtggcatttgagttgggctctgatggagacagggatactgatgggggatgggagcaaatgacaaagagagaggtgggaagaggcaggatgtgtctgggggtggtcggggctggaggcttagactctaggagtcactaagtcagacacttctggggccagataaagaacagcgtggagagaagctgggagtgagtaataggcagtggtggggacaaaggcaaaccagagaacgtgccccaggattgacacacaacaggcccgtgtgccacatttgcctctcggctgccagttttcagggtctggcctgcagtgagagatgaggcaagggaggtctgattgtaagaggttgaagtgcccaaggtgcccaggtggagcgggggtggtgtttaggagccggggtggtgtttaagtgggagagtgacatggtcgtgtttgtactttgtgctctctggaatcttccagagggtggactggaggtgagagagacaagaggaggccaggcttgtgaggaggccccaggtaggtctggtgagggagggagactgagccatgggcacagggttctctgccccctgtttcaccctgctggcttctctgcagtagagcttatacctcacactcggagagtcctgaaagtggatggcttgggcggaacttctagaaaggcagagggggccggcgtggtggctcacgcctataatcctagcaatttgggaggctgaggcaggcggattgcctgagctcaggagttcaaaaccagcctaggcaacacggtgaaactccatctctactaaaatacaaaaaaattagccaaatgtggtggcatgcgcctgtagctactcaggaggctgaggcaggagaattacttgaactggggagatggaggttacagtgagctgactctccaaaaataaaaagaacaaaaggcagagggaagagttcagtgaagtgggaggaccttagaaacaatcttgtccagctctccgagtttacagatgacacactgaggtccaggtcacagcgagtcaggcagggactactgttagaacccaggtctgtgcctcccaccacaagaggcccaacctcagccctgctgccctgaagcagccaggacgtggcctttcaaactccactttgtgatgggggtgattcagtttacccaactataaaacagggagcacccactcacatcaaggctgggcttcagaaccaacgctggggctgcctggatgaagcagagggcgaagcttgaggaatgctaattgctgggcttggctgcgagaggactggggctaccctggctgtttgaagtgcacgcgcccaggcggtccccagaggccctgacctcactgggctgtgccccgggaatgcctcacatgtctgcgcatccagcacccgtcccagccactgcccgtgtggacagagatcttagggtgcctgctgccatccctcaggcaggggcactggcccacaggaggaccggcgatggcagggcctggagaatcaccaccctgaccctcagacgaatgggcccaagcccagctccatcattgtggggctctagccagtcatttaacctctggaactgggcacgatgccccatgccacttgcagtaaaggtcctccacgggggtcgctttgcgccctcactgacctcacccctccctcgccctgttgcccccacccgctccagccacactggcctctgcgcttccatgaacacaccaggcatggtcctgcctcagggcctttgcatttgctgtggcctctgcctggaaccttctgcctggatatccacgtggctccctcatgtccctcaagcctttccactctctccatcttcacccccatccccgcaggccagcccccttcctctctctacccccatggactcggaacgcctgctggctgtgtgctccgttggttcccttgctcactggccgcatccccagggctgcccacatgcctcgtgggtctaggtgagagaatctatgccaggggtcagctcgttttttctgcgaaaggcctgagagtaaatattttcagcttcacaggccacccagtctctgtcctcactcctcaactctgcccctggggcccgaaagtgcctgcagacaataccataaggcatgactgggcctggcctgtgggttctgggctgccactccctgccctatggaaatcacctacttactgtgcacctactgtgtgccaggccctgggtgagccccccacacccatagatgctttctagacagggggtaaggaaacagaccaaggaaatcataagaaatggtaaaagtgtgacaaaagaagcaaacacggtgaaggggggacagaaatggggagacaggagcagggagtgggctcactggagacagggcagtctggggtggaaatgccagccttgcagccacagggcaagagcttggcaagtccaggagtgggaagctcatggggctgggggtgtctagggatatggaggggcagcaatgaccaagagcggagaggcagtggggaccacgcagagcctctgggcagggcctctgccgggcgggggtgcaccttattcctggaatggtagaaatgcagaacctgaccgggtgcagtggctcacacctgtaatcccagcaatttgggaggccgaggcgggtggatcacctgaggtcaggagttcgagaccagcctggccaacatggttaaaccctgtttctactaaaaatacaaaaaattagccaggcgtggtgacacacacctgtaatcccagctactcggaaggctgaggcaggaaaatcgcttgaacccaggaggcagaggtttttttaaaaaaaaaaaaaaagaggaaatgcagagccccagatcttccttgcacaagccaaatgcaggagggaccagtgaggggcttgcaaggggatcgggcccagggtgggggcagcagaggttttggggagtgggtgtgtgttttggagacggaatccatagcagtggccggtgggtcagaggcggggagtgtggcaaaggggagccccggaggacggtgatggcctccatggaaatgggcaaggctcaggggcagaggacaccaaaaagatttgggagaaatcacagtcaactcctagtgtcagtgcagagcccacccagcttctctgctgtcccacgaaggatgggagatataagttccatgtgggaaggtggctgagagcgggcagggcaagggcccaggccgggcagccagagtaccagggccggttcccagcctccttcagcctcagacacgccctggagtgaatggtttccatcggctgggagatggagtgaggctccttcatatacgtggggagcttgggggtctaagctgtgcagagcccgccagatcagtcccacgctgcaccacagggcccacacgtcctctctcagccttgctccctccctgtgtactgggctcccgcccttgcaagcccccagtggtggctacatggtgccaggagaggagtggcttgctgccaacagtgtgtgctctctgggaggtcccctgccatgagtttcctccccaggacctcacaggccccagggtcagccagcaggaagggcacgtccttggggcccacctcttaggacggtgggactttgacaaagtcatttcacttctccatgcccaggtgccccccactgtggagtggagtggattaccacacccacctggtaggatgctatgagcagcactgggggagacctgaaagacatcagggcgccgtgtggcacacacgcacatttgtcacctgtcaaaagtggcaagtcagcagggagtcctggaggacaaccagggccgtgaagcactggcagggtttctgggtacaagatgaagggaggaatcgtgggggtcctgcatggggaggaaggagcagggtagtggaaaggacagtttgtgcagggtgaatgtggggccacatcacaggagcaggcaggcacctctggacagcagcctggatcaggctgctgagctgggggtggaccagttgctccggccccatgggtggcagcctggagtgaggtcctggttcagcctgtgccctgggagtggcccttcctcggggatgctgttccctggtgcagtcttgttgattttgttcccagagttttgcctccatgggcaagttcctctgcaatttgggccttgacctccccatctgtgccttctaggagttggaatagactctgggccgggtgcggtggctcacgcctgtaatcccaacactttgggaggccgaggtgggtggatcacctgaggtcaggagtttgagaccagcctggccaacatggtgaaaccatgtacaaaattagccgggcttgatggcacacacctgtaatcccagctactcaggaggctgaggcaggagaatcacttgaacccgggaggtggaagttgcagtgagccgagatcgcaccactgcactccagcctgggtgacagagcaagactccgtctcaaaaaaaaaaaaaaaaacaacactctgcggttgctcctgggtcactggggagggaggcacagaggagagctggctatctcagacagtcccacggagcatcccgtgccagggtgagggggtagaggggctgcagggtgccggcagggtggaggggctgggtggctggctttgtgtgctccacacccacttccccatggcacagatcaggggcactgaggttcaggggatgaagtggcctgctcaaagccatgtggctgggacatggcagaccaggggcacagagccagggctgtgtggctcttggcatctgtcaggctgaagctgccccggcccacagaggagtgctcgggctgcaggaagggtcggatagggctaagtgatgtctgaattcctcacccgggggctgctcgggagttgcaggcaaccgcacacctactgggcctctagcaacagcagcaaacgttcactggatgccatgtagtgtccagtctataggggagacagcagtgaaaggcccaccccacacccttgctcctgccgttcctgcacctgcgggacttctattcagtctttggggcctgccaccgtggaaggaagggcaggaaggagggaggcaggagggagggcgaatgaacaatgtactcgaggagcagaggggctggcacggctgtgttttgaaacatgagaagcagaggctgggatgttccagggcagagggaatctggtgagccggtgagcaaagactcagaggcagctaagtgctgggcatgggatgaagggccatgtgtctggcgtggccagagccaaagaccgggcacacagacccaggttctgtccagagacagccagggtccagcaggagtctggagcagtgactgtaggacagaagcttgcaggctgcctgtggtgggccttctagaagcctcctgctccctctcggccttccctctcctggtaactccaatctctgatacctaccaggggctgactttggggaagtcctttcccttcctggggcctcagtttatcctctagtctgatggggcaggacttgaagagtccatcctgctctgatattcagcacctctgcgcttctctacttgggctggaggcagatcccgcccccaccccccaccacaccttcccctgaactacctgcccttcctatacacacacacacacagccaaagataaggaccagagccggggttctcctgaaagcccctggctagtttccaaactggctggtctctctaagacaggttgagagaggcgcctggagggagaggtacaggaagcacaggctttggagccagatcccatcctgcctgggccctgtgtcagaccccaggaggcagggatccctgcctgggggagctcaaaggggcctggggcctgcacttcctgggcctcgtgcagatgtgtccccacactaggaagcacagggccccagccttctcaggaagctcctggcccctgaggctgtgtgttgggtcatctcgcatctcctgagtcaaagcagaatggtaggtttaggaactcaggggtggggcaaggtgaagcctgttactagcccatgtcccagagaacagggtcctgcccttcctctcactgggcccctactgccaggtggagggtgggattctggtctttgaggcccatgccaggcagaggttggcctccaggctagcgctcctgcctttaggaggagcagccacaggttctgggagggcaggggctgtgtccagtcagtgtggagaccagcttcagcctgagacccagcctctgagccactattggcttcagttccaaacccactggggggtgggggcaggaagcaaggctgcccctctgtttcctggtccgcccagcacacacttttcctgaggcctactggtccgcccagcacacacttttcctgaggcctactggtcttcacagactcctcacaaactcatcaaggtgcccctgggaaccgaggggacagggctctgccttttatcccctcgggaaggggccagattcaataacaacactgcttttgggaaaggcattggccactttggactttattagcaacagtaatgtcccctgacatccgcacaagcttgtagctccacggccaggtcttcccccaacctcacaatggccccgtgatgcaggcaggcaggcgagtgggggtctcccctccttatccacaggccaccgaggcccagagagggccttgcccgaggtcacccagggagtggcttgctggagccctgggaataacagtcccacacaaggctctctccctccgcagctggacctgtacgcgggggctctgtttgtgcacatctgcctgggctggaacttctacctctccaccatcctcacgctcggcatcacagccctgtacaccatcgcaggtatggtgcctgcagcagggaggtccacccaggggacgtgtaaaggggtcagaaggccacctccccctacaggcccgagggagcagcccaggaagtggccccagcaggagccccagaagttcctccccgtgtccctcctccctggggccagggccccctccagcaaccttgcttccactggcagggggcctggctgctgtaatctacacggacgccctgcagacgctcatcatggtggtgggggctgtcatcctgacaatcaaaggtgaggacagagtctgtggccatggcggggctgtccccacagcgagccctttggagtctggcactgcccggcactgtgcaggattcatgccgttggggttctgggtagcatcgctgggagtgggtgggttcaggaggttgagccactaggcagtcagcccccctgctggcccctcagggactgccctggctggtagaggctacccaccctgctgccccgctgttaccagctctggccctggcaaggagctgactcaggaactcagggccagccacacccgcattggctcagcgcttgatggtgaggtggggctgtaggcgggtgtgaaggcacacaaccaggaggccataaaactgcctgggcagctcctccaattgtttaaaagcatgtacaaaatgccaagaggtgatgctacctcctgcaggacaaaggccagggaggaaagaagagagctgggagagattggcgatactagtctggaacagataggaaactcacagggctgcccggagagagcgtgagctcaccgtccctggaagtatgtaagcagagccaggaggatccctcagagagtgaacaaatctctaaagactcttccagactcagacactgggaccctgtggctgagcagtttctaacccttgaatggcacttgttcatttgctctgagcctcacacaaaccctcggtctgaatacagagcctgacctgagctccatgggaacagtgatgctggggagaccagcatccaggcagcaggctgcctcttccatgtcccacttggaaaaggctagggagtagggcctggggtggaaacgggttttcctacatccaggcttctccctctcagaccaggggctctagtgtccctgggacccaccgcatgagagggatcccagcagccaggcccagtctggaagggaggggagtgacacagacacagatgggccagggcttggccatgccgggccctgaccccgaggtagacaggaacagtgaggtgttttggactggagaggaaaaagccccggcttgagcccgccagatggtctatatggtcttggtggaggccccatccctctctggacctgtctccctcttctctgtgcctcagggggtggggccacatcaccaccagccactctcagctctgctaaaatcacacccttcaggtgatcaggatgaacactttagaagcctcaggaaggtcctcaaatgtcaagaaaaattacttttgcttccttgaatcgacaatcggaaacctggctgagaaccacttgcccaaggccgatgagtgtccagaggccaacagtgactcctgctgggccagcgggacactggggtgcccatgtgcaaaatgcttacttaatagtattattttaaatacgaataaaatagtcattcaaatacaccttaaaaaaaaaaacaaccctctaccctcacacctttccaaacactgggaaagatgaggtggaaaaaactcaagtttgatgcatcaggaagtttcttgtgagatgaaggcaggggggagcccagggagtcagggccccgcaaccaccaaactgtccctgttccaccctgacccctccagcttttgaccagatcggtggttacgggcagctggaggcagcctacgcccaggccattccctccaggaccattgccaacaccacctgccacctgccacgtacagacgccatgcacatgtttcgagacccccacacaggggacctgccgtggaccgggatgacctttggcctgaccatcatggccacctggtactggtgcaccgaccaggtgagtgccaacgtctcccgcccatcccaccttcctgccgtcccagtgggctctggtaggcccaggcggcctgtctgccctccgcgtcatgagtctgggctggggcctcagaaggtgtggctccaggctgggacatgctgctaggggtctttgcggtcccggggggcttgagccctccgtttagaatccgatgaggcccactggctaccgcccgtcctggcctttaggtgcttcgactgagacagtttggagtatgggattccgaagggactcggatgctcctcggtggccctgccatcggtcatggggcgggcattttgggccagtcttgggctgccgggatccggaagcaggcggggtacctgacctcccttggcctgccagtggtgggggccagccatggctgggccagcgtttctggtagagctctggacgctgtcagcagcagagcggtacctagggggtcctgggaagccgtctttatccctagtccctgaggcagggaccctgtgatgatgaaactgctggccctgggagagagagagcagagagtgaggctgagcaagaagggccaaccccgccccagcacaggaccctgctcaggcacacaggagccggcaggcccgggttcgcctcctggctctgccattcaccagggagtgggcctagaccagttggtttagtcactcgatgcctcagttcccctgtctgtaatatgggaataatcctgccctttgtgggtgtagcaaggcagcttcctcccagctcacccccgcagcctcctctattccgacacaggcctgggacgtggttggaaatgggctgaatggggttgttggaggcaatgcaggagtttctgttgagtgcagggggtgactctggccctgccctcaagaccctgtcaccagccctccaggtgacctcagatgagctgcttcctgtctctgggcagaagcagatggtgcccttgctttgcttgtcccaaaggccgtgggcagctccagggagcatgggggtgggaaaaggcctgtgaagcagtgggcacaggccccacaattgtccatgcctctggacccagccccaggggtccaccataggacaaggcagccacagccagcctctgtggaatgaacgatcacagcgctcacacaagcctttcccacgtggcctaccctgggagtaggcccgaccagctccattcataggccagagcactgaggccagagacagagctggatccgaacccagagtggagtgacttttccgtggttcccgactctgctcttcctctcccaagcagcacgggctccatcagtatctgcccagagaccctccctgggttccaacagtaagaacggacctggccgggggcggtggctcaagcctgtaatcccagcactttgggaggctgacatgggcggatcacgaggtcaggagatcgagaccatcctggctaacacagtgaaaccccgtctctactaaaaatacaaaaaattagctgggcacggtggcaggcgcctgtagtcccagctactcgggaggctgaggcaggagaatggcgtgagcccaggaggtggagttgacagtgagcagtgagccgagattgtgccactgcactccagcctgggggacagagcgagactccgtctaaaaaaaaaaaaaaaaagaacagaccccaactaggagctatcagaagctctggaaggctgggcctcagtttccccatctgtaacacgtggtcctcaagcagggcccctcatgctccggcatgctgtgctcacaagctgcccacatccgccatgcctcatgggagggctttccagggaacatgtgggctcacagcaggcgtctgcccagttctcctgggagggctgagggccagccccagtgggcaaggggctggtgaaaggttggccgtggagggcacagtaggcaagtggtaccctgccaggctgagcccctttacacccgccacctcccacctcctcccaatgcagcatgggcttggcatggcacggtcttctctgggtggaacatcagtcaggagattttcccatcaaggccaaacgaatctgcacatgtcctggccttggggtcagggttgggcaggccccactgcacagataaggagcccgaggcccagagaggatcacacagggaggtggaggaggaacactgctgaccccaggtggttcaggacaccaaccagcattggagctgtagcctggcctctgccctacctccccatcctctaccccttgggctgggtctgcctggtggatgcggggcctcggtccagaaacccaggcactagtcctacttgaggttcctggtctctgtgtggctctcactgacactggggacttttaggggcacctagaggtctgactccactttgctctgtggccagggtagccctcaaagatagccacagtctagtcagaagggaggtagcagttctgtgtgttgagaccataggggtgttttgcttttttttaagatggagtcttgctctgttgctcaggctggagtgcagtggcaccatctcggctcactgcaacctccgcctcctgggttcaagtgattctcctgtctcagccacccaggtagctgggactacaggcatgtgccaccacactcggctaatttttgtatttttttttaagttttttttttttttttttttttcccagagacatagtcttgttctgtcacccaggctggagtgcagtggtgtgatctcagctcactgcaacctccgcctcctgggtttgagcaattctcctgcctcagcctcctaagtagttgggattacaagcgtgtaccatcatgcccggctaatttttgtatttttaatagagacggggtttcaccatgttggcaaggctggtctcgaactcctgacctcgtgatccgcccacctaggcctcccaaagtgctgggattacaggcatgagccaccatgcccagccaatttttgtatttttagtagaaatggggtttcaccatgttggccaggctggtcttgaactcctgacctcaagtaatccacccatcttggcctcccaaagtgctgggatacaggcatggaccgttcactatcttctggctcatccatgacaagtaggtggcatttttctaaccagaaacaaaaccagtaacaaagaggcaaagggtccagtggacagagccctggtctgggctcccgtctgggctatgcccctgcccctccctgggccttggtgtccctgtctgtgaaacagggcagtgcacagaccagaaggcctcccagggtcctgccagctctgtcacctgctgatgccgcagctccaggccgggtgccctcccttagtcagtagcagccacctcagtcataacagcaaccacagctttcgtgggcagcgtgctgactccaatggccacaccccaaaactcactcatcatcttccctgagaaagagaactcacattcaccggaggcccttgaggagccagggacaggcttggccggctacactagcagcctcacttaagtcgttgcaacaactctcctcattttgcagatgaggagcccaaggtgaaatggccactcagggagtgagtgccggcttcctcagggaagagcgcctggctgggactagacaccagtgctgggaggtgggggtgagcagtggcctgctgacatctgagttgggggcccagccttgctatctgacagtcaggggtggggaaagcccctgccctattcagggggactggcaggcctcacagctcatggaaactctgagcctcagcttctctacttggggtgacagcacctgtcccagggccagctgacatgagcacagattggaatatagaggcaaatatcccaccaatggcaaaaagacattcagggtcttagggaaatgcttctctcccaagcacctagacagaaccaccgtctaactctctcattgtccagatggggcaactgaggcccaaactgaggcaagggcttctcccaagtcacagcaagctggcagagaagcaggaaggacagcagcttgccctgcgttcggaggctgcagcccgcaggcattcctagcctctgtaattaatgtttccgtgacatccacagcttaggggtaaatgctgggagccgtccgttaaactagcaagcttggaaagtaagttaaaatcacggaggcagccggatgcggtggctcacacctgtaatcccagcactttgggaggccgaggcgggcagatcacctgaagtcgggagttcaagaccagcctgaccaacatggtaaaaccccatctctactaaaaatacaaaaaaaaattagccgggcgtggtggctcatgcctgtaatcccagctacttgggaggctgaggcaggagaatcccttgaaccctggaaggcagaggttgcggtgacccgagattgcgccattgcactccagcctgggcaacaagagtgaaactccatctcaaagaaaaaaaaaatcatagaggcttcctgctcctgagttgcagctggtgacttaaactgtggaaccgcaaaggaaaactagttacgtttcagagtcataggtcgtacaactttgtgaacgtactaaaaaccatgggaacagtgtacactttgggtgaattatatggtctgtgaatatctcaataaagctgtttaaaaagtaactcttttgggctgggcacggtggctcacgcttgtaatcccagcactttgggaggtcgaggcgggcgatcacgaggtcaggagatcaagaccatcctggctaacaaggtgaaacctcgtctctattttaaaaatacaaaaaattagccgggcgtggtggcaggcgcctgttgtcccagctacttgggaggctgaggcaggagaatggcgtgaacccggaggcggagcttgcagtgagccgagatcgcaccactgcactccagcctgggcgacagagcaagactccgactcaaaaaaaaagtaactcttttgaagtagaatcgtaatatcagtgctgggagagatctcagacattatgggtccaaattaccgctccctcctcccattctgcaaatctggaaaggcctggttaggatttgctgaaggctcccagaagggccggtgtcctcagatagcttctagcctccctctgctactgaactgcaagctttcaaaaccccaggtcttaaagcacctgaactctgccagccatgcaaacacagttggcgccagtgtctgctcctggcactataaatgtgccagctgctgtcatgagggtccaggagatgagggtaggggtgtatgtccccataccaccccacccagggtctcctccagccctgacaattgccaggggtggtgggctgggcaggatccacacctcccctattgacaggtcaggggactgagtccctgggaatgagtgtacctcggctctcgctgcttggcctgctgaagtgagctctcctggtgggaccctgacagtattggggctttgagtgtggctgttttgggcaggtcagaggctaatgggacatcatcgtgcctcatgcccattccctgaggcccaccaaggaccaatcctgacacaagtgtccctcaggcttggactcaccccgtctcgcactccacccccaggtcatcgtgcagcgatcactgtcagcccgggacctgaaccatgccaaggcgggctccatcctggccagctacctcaagatgctccccatgggcctgatcatcatgccgggcatgatcagccgcgcattgttcccaggtaggacgggctccgggcactgaacccaggctgcagggcacccagggttctgggaccttgtcctgcaaacgtcaccagaagaagaggcaaaggatagatgtgaactgttccccaacctggggagtggggagagtggtcctcagggccacaatcaaagggattaacatggatgtggcttggcacaaggtctggacaggtatcacttactgctgtgtgacctcaaggctgtaaatgaacgtccctgtgccccgccttttcctcatctgcaaactagggactgtgccacccatctggcaggtgccatcaagatcctctaaccacaggctttggagacctctaggtggggaaacgtgcattttcttaggttgccttttcaggatgctgggaccaagagtccccagcattaatgatggccttccatatggccctggccggttcccacccctgcctgttcatcaagtttccccatctgtaacaagggaattgaagtcatcagagtcagggacatggtagcccagaagacaacagctcgagctcttgggtggctggcagggagggactcgtgacccctggtgtgcagggaccctgacccacctgtgcctccttgtctgtggagcgctgggcctgcatcctcttcaacgcatctgcttcttctcttccccgactctgggcccatggggagccaccctggggtccaacaaaggtccctcgggttatatggggggcactcagctgccggcgcggtggtggggttggcccgttggccacttgctctgagtggcgcctccggagagggactgagtgctctctcacctcgaagtactcctctgacacagaggaagccactgagggccgtcgggggccagggccacggccggagctgcctgagtggctgtcctggtcactgagggttacgtagtcgtcatcatcttcttcttccaccccatccagcccattggggagccccaccccgaggctctcggggtcatcctgggtcacagatagctgccgctggagtggggcgtggcctgggcctgccatcctgggtagcctatggtctgtcccattctggggagcttcctctttggggagctccaggacccagccaatatcactgctgtcccgggctagtacatctgccacagggactgtccggggcttgggcacggggggcaatggctcagggtccccctgggggaggccgttctcagctgggacaccgtcctggggggcactgggctctgggggagggcaaggctctggacggggcctgctgtcctggctctgcttccacagctggtgctgggcgctggcctgggaggtgtcacggatcttgatgcggttcatctggctgggctgggggttccagatgttggggtcgatgatattgatgtagcccaggatgtcgctgccaggctccgggtctggctccacccacgtgggcaggtactcaaacatgttggccctctccaggtgaagcagtcctgggtggatgggtggcagcagctcggggagttcccctggatgctcagccagcgctgggcctttcagccccaggggcttcttggcctcctgcttctcagaggagatcttggcaatctcgtcgacgctcttggccttgacaagtgcgtacttggggttgacgagcttcttggccacagtgcccgcgggcaccagggggaccacagagggcagcacaataggctccggctccggttccttctccatagggatgcccttgaggctcacactgtgtgacatgaggtacagctcctggaactgccggtcaaacatctccaccacctggccagacagcacagagatcacattccggtccgtccgcgcggccgaccacgtgaagctgcaacagagggagggggcgctggtcaggcacatgaccctgcttcctccgcccagcccccgtgcacccatagccgctgggcctcagactgtggccacagggccctgggatcaagaagtgaatgggggcagagagcaggtgcatactgtggggtcagactgagtcggatgtcaagcaagttggttgcaccaagcccattcccacctctgcaaatgacagggcactgtgctcctctcaggctggtacaggattcactaagcagctcaggaaggccctggacactgtggggggttctgcatgtggtggccgctgctgccatgcgtctatgctgccaccaacccccatgtaaccatgggcagcgcccaccccatgccccatgtggtggtgcccacagagctggccccatccctaaggacggctctcagagtgacccccataggcttgcgaaggcacggcctggccacaccccacctccaggccggtgacatctccaagctggaacaacagcgtcctcagacaaagcccttctctgcctgcctccagagacagacaggcgggcagatgtgctccagccctgcgcacacctcagcagccttgggaccaatgaaccggaataaccagggttaggattaagggcagaagccagttgggagccagaggtacctctcgcacaacttccctgaaagctggagagtcacctgtaggagccgcacacagcccggtctccatccacaaacatgaacttctgggccagggcacccttgaacttggttgccgaccgcgtgaagaactcagttcccccgctgctccgcactctgagattctgttttgggaaccaagagacagaattacacgactgcaaccctgaccacacagggcgaggggaggacggcagctgcccagggctcagaggggactctggagtagtcaggaggggaagaaagaggctgtaaggcctggagaaaggggctggtgtgtctgggactgcagggctcagggtaaggagggagctgctgagccgtgaagctacagagcgggcaggcactggtacaaaggggttggcataagatggtctgggctttggccctaaaggtgtctgaagagcagcatcaggcaggaaaaggcttacacagccagccagcttgggaaatgctgccgtgggtggtggatgctatggtggggtcctgagcgggagggtgatgtgcacacgttttagaagtgtctcgtggatggctagggggtgatgcagccagaggagggcaggaagggggcctgccctgcagaatctgtgccttatactccgataagtctgtggccctccagggtgcgtggccctacccggcctctcccctgtgcttctcaacacccctgtctctgctgggctctgctccgaggacaggactcacagcaaacctttctccttccccatggccaggacaccacccagcacccaggccaggtcctgtaaatggtcagagattcaattctgtgccggcttacactgtttggcccaggagcaggccaggaaggccctcagagactgtggccaagggagctgagacccaaggagaagagggctccttgggcatgaggagcacagcgggcccctcaactgcctcagctccaaggccaggtcgtcaccggccttttcctggaccctgaacacataagggccctctgtcccagtgtggagtctctggagctgccaagggcctgtgtgttatgagctccaggtgctgacttccctcccccaggtagcaggacctgctgtgagggaggagcagatggtaaaggctggtgctgggcacggcagaccccaggaaggacagggcgagcctggctggaacccaagtgtcgaggatggccaagggcatcccgaagtagaatcacaggtgtaaaggggacctggggctcatctggcccctgtctagggcagtgtgtaagaaatgctcctgggtgccctgagggtctgactcaggaggcctgaggtcaggcagggaatctcagttttaacacccactccagggattcctgactggtctgcctgcatgcctcctgtgatgggagtctcactccctcccgaggggctctgtgccggcttctggctctcggctatgacgtgttcttagtcaggctgagctgtgacgtactggtctgtcccctcacccactcactggccccagcttattcaccccactcattcacatagtcatcaacccctgccgaggcctccagctgcagagatgcctgtgatgaggatcccacctgggaggtgaaggggaggctgagggggtaaacgaaaacaagctgaatgcccaggatcgcagaggagtagcctgaagtgtgaagggctggccgggaggctcccgggagaggatgacataggtcacagggggaggtggggaagcattccagggaagggactcaaagaccaggcatgagaggcctttgtacaagagcacctcaggggaggaggggtgggtgatggagcctgcagagcgagcaggggcgggctcctggtaaaagaccctgcaccggcttaagagcctgagcttggccctggggccagtagggagccatgggaggatttacagcaagagcgatggggttgggtgtgtatctcaggagcagtgctggcatcaggcagtgggtgtgtgaggtgaatgctatgggagaggaggggagcctgagagagcagagctgcccgccatgccatccagcctcctgccctgccagtcctttccgtgtcccagacccctgtggctggggtggccccaggcaagcaaccacagaggcaggcaggtgtgggccgtgggtgagtccccatctgatgcccacctgtgggataaaccatagccttttcatagggcccagtgcagaaggcagataagcctctgctcccagggccgccctcgccggccccccaccccgcaggctgcaggtttgcacacagccagctcagcaggaagctggccacggcccaggacaattagcgctcgtgactttgtacccaacatggagcacgctcggggttgagaagtcggacaaagatcctggaggtggtacgaggccttccctgtcactgagcccaaccgagcccagctccaccgcctcctgcaggctcctggcccggccacagacccctccttagcctggaaaatcggccgccagcatcaggacccttctggacagtgtctgtccccacccatcccaaaccttgtcctgatgagggctcggaaagtcaccacttccatctcagagtgactcagcctccgtgtgagccgcaggcctcggctgggccgctgactcgctgtgactcgaagcaagtcccgggcccttgctgggccttagtctcccttagcacacagcagggcgggcctccaactcttaggcctgttctacctggggctcagcagcaggtgggggcctgcagcagggccccccacctcttgcctcatggcctgctccccagcttgtgcctggatgggccccaccccacggggcctggcctggatgaggtaacgtctcaagactctgggctcgtgtgcgcagaggtggaggatcccacaaagctgcattgtctctgagctcctgggacacccccggcacaggacagcagatgggtggagggatgccggggctggcccaagaggggtgccctggaaaagtctttggaccctctgggacctcagtttcctcataagtaagagaggacgtcaagggcgagtcagggcaggggaggacggccgggtggtgcttcatctgctctcagcgggtggcaaggcaaggtgggggctccagggctggggcaaactacagcaacctgcccccaatccccccaggcctccaggccacatgtgcttaaaggacatgtgatccaactgtgccaagcccgctggtgcgaggcagagggggctgagcccaggagcccctggagtgggtctagggtctaggcattcctgagctccagtcaaacaggctccaatcctagcaccaaatggacgccaaccaaggcctttctttccacgcctcagttttctcatctatgaaagggtctactcatccttgtgctgcaaggctgctgtgaggactgaatagagccacagtacaggtggggccctcccagggaaggtgtccagctcccagtgggtgccccatgaactggaagtggcgcagtgggctgtgggggaccaacacagaggaccacaaaacatccaggagggatggactgcccagggaggccaggactgtcagccgtactgggtgggtggttggtgggctcaggtagggaaagtgacctgcccactgtctcccagtagccctgggctgggccgggactgaggacagggctctttcatcacccacctcctcagggccctgctggccaaacaccgtctcctttaatttcaccctcacacaaccccgtgaggcatcactatggccatggggcgctcgaggcccagagaggtggaaccacacgcccaggtcccacagcaggtcaacagccagtgagccatgtaggcagcaccaggacagcctgtgctggcaggttagctttggttttggttttataatggaagccagtgattacttcccctgcccatagtgggatggccattcctaggtttattgatagttgagtagttagtgtgaatgagtagaggcccggtagagcagtggggaggtccagagatgcatccttgaccaggtctgagctgggaacagtgaggccaggcctagtgtgaggaatgcaaggaacagagcccaacatagcagcaggagcctggctgcctgaggtgcaggcctccagcagcctctactctcctctacagggcctgtctcgctctctgtggagggtggagaggggtggtcaacactcaccctggacttctccaggctgttgtgaagttggggtggtgggccctttgtgaaccacatttggcccaaagtatgtgacggcatgtaggggcagggccagcctagctccaaggccctggtctgaggggctcctctctcccctaggccaaggctgctcagcctctgcacaactgatacatgtccccttttgtgtgggacctgtccccggcagtgtaggatgtttaacaacatccttggccactcaatgctggtagtacccccaaggtggacagttaacaatgccaaatgtccctcagcagagtgaatcccccccgtttgagaacccctgccttggccgggcgcggtggctcacgcctgtaatccccgcactttgggaggccgaggcgggcggatcacgaggtcagcagatcgagaccatcctggctaacacggtgaaaccccatctctactaaaaatacaaaaaattagccgggcgtggtggcgggcccctgtagtcccagctactggggaggctgaagcaggataatggcacgaacccgggaggcagagcttgcagttcacgccactgcagtccagcctgggcgacagagcaagactccctctcaaaaaaaaaaaaaaaaaaaaaagagaaccctgccttataccctgaatccaccacagacccaggcccaggtagagacagcaagcaacacccaggcatccccggggaacgggggaacctgggcagcggaagggctgggtcgtgcctgtccagcgtgaggcctgagcggcagcgatcctcacttcctcaccgtgtgccttcccatggccatcccagctgatgcttctttgttcatcagaaacgggaaacgggtctggcctttgcccaggggctgctggtatttccagtttggctgcacgaagtcaactggcttttcagatggcccaggcatctcatggctcttgtctgtcctaagctggaagcctcaggcccagcctgtctctggttggcctgggagcatccctccacacccagtatcacccccaaaagcagccaagtcatgcggcctggccctgtgaccctagagggtgtcagtgaaagttctggccctcttcccaaggcctgctccctatttgtcatttggggtggtcattcccatactcccacatggagggccactggggccggccagggcaaccggctgaggtgcttaggaatggctgggagccccacatttggggagacactggtgcacgctgctcccacctcacctggggaccaggagtgggcttggcccaagcaacagggcagcgtttcgagagtgtgttggtgtgggctccaagctcaggaggaaggagccgagtgagggtgaaccacagccagaccctggcgcagagggaaagaaagccgctcagcactcagaccagagctgcgtctcatggcggggctgtgcctgtccctagccaaagccaggatgggaagggagctcgtgaccgaaggcccaccgcacaaacggcctccttcactcttcacagcacccctgacagataaatgaccatgtccccattttgtagacaagacaatggaggcctagaaggattcagtgactctgcccaaggttaccatgcaggtggcacagctggggctcaggactggctcctggtatcacccccaaactggcacctgacaccccaaggtcaaaaggatgaccctaccagaaaacctgtaccctgcctgggcccaaaggagctggggcaggttggtgcagagctgggcaggggtggcagtggctgagggcaggcccagggattatcggcaaaggaagtgctcccgggacaggtctgggcccagctagctcaaggtgagggaggtaggcagggaaggcaggccctcgacagggggtgacacttggctggggctgggctctcagggcctctggccacccgcccagggctgtagaagggcaagctcagaggcgagaatgaggaagccaggtcacactttcccatggaggcgtctagctcctggatatgtcaccctacagactctgccaccttccctggggaagcgaggcggctgagcagggcaggcggggccagggacctgcagtgccagctgccttccagctggtcacagccagtggaagggctgggggtggaacagggcaggcctcatacccaagcccctaccccagcccagggcctgggatttagaatgtgtggttcttgccagtagctgtataactttcctcagcacacacagcactttacaaccaccgtctcctttaatttcaccttcacacaaccccgtgaggcatcactatggccatggggcactcgaggcccagagaggtggaaccacacacccaggacccacagcaggtcagcggccagtgagccgtgtgggcagcaccagggcagcctgtgctggcaggttggctttggttttggttttataatggaagccagtgactacttcccctgcccatagtgggatggccattcctaggtttattgatagttgagtagttggtgtgaatgagtagggtgggagtgctagaagattggttgagccaataaaaaggataagagaaattaatataagggatcaagttcatcctttgatgctctgtgttattatttgtagttgtttattatttgctgcttgagtaccagggatctgcagcctccttgtcagagctgatttgtcactattggcttttaggcgccacccctaaattggtcggaattgctttgggcaaggcatggcctccctcggatctcagtttctccatctgtcttgtgggagcctcatctgaatgacctcaaggccccttcaggcccaggcactccaggccccccacctgccccattgcctccggcttcctggaaactcagaactctgcaagcagcggagcagccagggcttctctgctgagaaggggcctgggtggaaggcgaggcctctggagtggctggccccaggttagggtccctgctccaaaccgacaggcttgctccctgcttgcgtctgcacgctgggggaagtgcaaagcactcgctgggcctggggcaggggtacggtgctggtggggccccactggggtctcttcctgggcatcgggcagggccaggccttctgcagtcaggtttccaaagtggcctttccacactggctctctcaggcatgagctatctgccactggaatcgattcccagcactaattacgcggcggggagtgaggtgggtgtggggcttggggccaacccaccagggagaccacattaaaaatgtcccaagagctagagactcaccacggagtgctcacaaccacttgaaaggactcaaccggaggcgttggggttggagggggtgggcgcgcctgacaaatgctgacaaattacaggcgtggagcccggccccttgttaaccagactggcggtgccccttctcctaggaccacaagcctgaaacctgcagaattttgacctgtcagacactggtgctgagcccaagggtctggagcaggcctctaccccactatctttaacttgctagcagtgacatggggtatgtggctccattccctcatctgcaaaatgggaacaactccctatcccactaggctgttgtgaggattaaattaaccaatgcaaagtgcctgtgacagggcctggcgcacggccaatgcaagagaagtattcgccgtcatcacgcacgctcatctgctctcagggaaatgctctgcacgcagcaggtgccaagcgatggctggcagaaggagggctccagacaccaaatgccagggtgtctgggcagaagagcgttggaccaatgagatcctgtagcccagagaagggaggtgacatgcccaaggacacacagcaaaacagtgctgagaaccacagcccaccctgaccccatcggcagccttctctgatccacttctgttccatggtttcccccaccccaaaggttctttctcctctgctcttgtgccttaaattcacttcaactgtgcagccatcgcagaagccttccctggccccagcctgagggagcttcctctgtctgagccagaatctaaaaccagtaaatggaattctaaggagacagatttgggcttaacccaagaaaggacttcctgggagttgaagctctccagaaaggccacgagctacctgaggaggcagtgagcacactatcaccagaggtatgcaagcaaacagataaccgatgtggcatgggctgctctgaaataacatgatgcagcacttggcatgagctccagcacctggtcagcaagcacctaatcagtgtttattttatctctgccacgttggaggtagtgagtatcctgcccctcagggaattcaagcagtggctatgtgactgcttggcaggaggctctaggattactggactctgagtgcctggcacaggactccgtccagagcaggcaggtactcgaagtgtttgttgacagactgaatgacccctgccctccagccacccaggcaagtgaggagcctgctcaccttgaggtgccccaggtgcatgcaggcccgctcacacatgtgcaggaagtacttgacgttactctcatccacgatgatgtacacggccactttcctcttgaagccggcgtccagcaggtccttgaagatgtccacgtcggtgaacatgtccatgaccacagctatcacctgggagcaagaagagagactagggcctgtcagacagtgcagcagtggggacagggtgccctggcagagcgcacagccctcccatgccaccagcctctcacaggtgcccactctggccctactcctggagcctcaggcccgggaccaggaagtgaggggccaggggcctctcttgccctgaagttctagttgcagtcccagctctgggctcagcccaggggccctgtgttggtgcattcccaggccagggccggctacgctctgccctccttgtaacacctgggaatgctgagatgaacctgatgtgtcaatgaccggaagggcagcagctggcgtggcggctcgctggggcatcccctacattcctgggctggtgtggactttggccagtgtctaaacccagatctcttcctgtcagctgacaacatctgtccccatagcaggtgacctcctgctggacctggctcagggtggggccccagtggtcagggccttcccccagcccagccaagcaccaccaacagggcagggggcctggctgagtgaaggtgcaaggtggaacatgcagaaggacaggatgaggtggtatgggcccggccccagtggggctcagtgactgtcaggcttctctcacacctagtcccctccctgtcccttggcagcaaggggagggagtcaggacagggcctgtgcctgggcacagccgcctacactgctgatgcagacacatgtcccacttttgggcagccccacccctcccaccctccgagcctggcaccaccatccctgtcccaggtctgaggaccacctggagaagaggccagggacctgccctaggccacacagcaagctggggacagagtcaggctacagactaccctgacttgtcagagagcaccccagccttgctgggatgcggagattcagggtggtggaggcggcctggagcctgctggggatgtgtctgcacgccccaaagtgagctcaccaggctggcccctgcaggcccatctgggctcctcctgggcctcaggcccccatcgttcacctggcaccaaagcccaaactccagcagaggggagggctccatacctgccctgcctcaaactcactgtgtgaccctgagcaaaacacctggcttctctggacccagttttctcatcagtatagcatgctccatctctcaggagaatggagcacacctgaataccgcagcacctgcaaagagcccgacggggggctggggcgggggctcggtgatgcccgtttgctgcctttctcccacagtcaccccgcacgttcccatttacagggggtcttgtcagcctgactcctgcagcctctcacaggcaccatggtggtgacagcccagcatgcagccaggtaaactgaggctcaatgaggttgtaaggcttgttggatgtcgcaaagcaagttgggccagggcctggacctacctccgagtcaggtcagggttggtctccagtaccttctcttggacgtttagtctcggagagcctgggagagagtggtccccccagagcggacagcggaggtgtgggaccagctgggactcccagaactccaaggcctagggttctctctgttctctggggagatgactgctccctatctctctgtttctgaagggctgttttggggcagagggagtagctggttgatgcagggtctacgactcgcaggggaggcagatgttggcaccagatggggaagcacttgctgcccccagggctgcccaaggttaaacagggatcttaagagggagctcactccctgacctaggagatgttcaaggaaggccagagactgcttggagcgggggtagatgatagggcagagaagacacgatgcaggcaggtcaccatgaccctggaggcagtggtgttgagacactgggcaggggtgtgtggtggtagcagggtcctccctgcctgggatctcccagacccaaagcctctccagccccagaatctccttagttaagccacttctgagcaggcaaacagcctcacgtgccaccctggaaaggagcctaatgagggcgcagtaggcatgcttctccctggagggcaccaggccctgcctaccgtggcagatggggacttgccctgggcttgggctgggggacgtgccccagcaggacccgcaccatgtgcgccactccccacattgccctcagccaggcagggtgcctgatccagggaccatctgctgtcaggttggatatgttggagcctgcactccaaaatggatccccccacagtcctggctctccccaggcattgggttcagtgcctagggtggtcagagatgggtttgtaacaggcacgagcttatgctggggatggggagggggagcctggtgctcccccaggcaacccccaacagcctggcctgtccatggagccacaaaggtttcttgggggcccttgagtcctgtcatgccctttcccattttatagacaggaaagctgggatcacagtccatgactgaggctagaacccagggccctgtcccacccagagcaccttctgcacaagagactgggcatcagtcctgggcccttgagctgcttgatggtttataaggagcctttacagctgttaccttgttcaggcctcacaagcacaccgggaggcagtggttctttttcccattttgcagataaagaaactgaagcacagaggcattcgccaccttgcctaattctgttgggaggcccagctcacttgtgacaccatgagctcagcaagagcagagcccttgtctgagcccaggacggggcctggtttaaggaaggtcctggggagcttttatcaactgagaacaagaccaactggcttggtctgggaatgactgcaggaatcagggcatctgggaccacagcccctcctgggcccttggcttccccatctgtcaaatgggggtgtgggcctggcttgcccctgtggttctatccagttcacacattgtcagagctggcccaagtcaagaaaagtaccagatgcttcacgtagccccaagcccacacgtcctctcagaggtcctgggcagggcaagggctgtggaaatgagaggggaggctgactccaaagaccagctctacctgctgttatgtcaggggccacactgggcaggaggcgggtggcctgggtcccatcactgagcttgttccgctcctgaggcaggaaccagccatgtccatgtgagcagctggcacaggggcaggcatggcaggcgggcacgtgtgtgtcctgcaccccaggtaccgttgtcaaagccgacgggcagctcccagcccagcagcctggaatctgcgcaggccacacagcccagctcccaagtgaaggagggagcccagtggtccctgtgcatcttactgatggacaggcctctgctgggcggccttgaggcctcgaagatgcagctgcagaacccaggaggcccaatgcccaagacaaccatctgactcctgccagggtgtgggaggatggcccaagatggcagggtgtgggaggatggccatgcctggggggcagaggcaggcaggctgcactggagggaaacaccagcagggatgtgggcactcctccagtgagccaacagcgagcctgcgcctgccccagcccaggcctctccctgggggctcctggtgcccaaacacctccggcatgtctgtccaggggtgtccatatgcacaagccctccagcgccccgcccgatgagcacctcctcccatgctgtaccctccctgcccagtggatccgccggccttctccaccctgccttctgcctgtgtctcgaatcccccacctccctctgtgtccttgggacagggggacatccgcctccatgtgagagatgcagaaactgcagctgggagaggggagggcactggtccaaggtggtgctgcatggggatccccagtgccctgccaggagcacctccaacacctgggcagtgaccggagcagcttgagctgggatgcaggggtgacagcatctcacacaaaggagaaccccacctgtggccactgccccccagcagacacggcctgaagccacgtaacactggctgctggcgttgggggtgggacagggctttaggtcacagaggcagggagcacaggcgtgggcctcctcaatctccctcagccccagccagagccccctgagcaagggtggagcgggcggagtcggtccagcaccggcgcccaagctctaggctgggctttgggtgagccacacctgcgttccaggtctcagtttcttcacctgtcaaaggagaaggtggacaagatgtccaaggcccttcgtctctgatgtccctgccgagggaccccaactcctgttccctgcctggtgccgggcagggcctgtctgggcggctaacacatctcattgcgcccacaggtctgggagaggaagtgctggtggccgccctctccctgcctccccacacagctcctgcctcacaggtgccaacaacagcctgtggctcctgacacccacaacagctgtttcctagccttcctgtgaccacagaaccactcttgaagcagaagtgccctcgcaggacgagtaggtagaacaggtctccacagaggtgcctggggaggaggggtggggcgagacgggctggcctggttccgagcatggtgggaaaccacgggtgcacaggcccagcctctgcagcagcacctcttcaggggggccctaaaccaacgcatcctgacccctctccccgacgcttcctgatccctctccccgacgcgtcctgcctcaagccactgtgtctcctacatgttgttctccttgccacctgcccattttgcatctgctcggacaactaccttttttcaaatcccaactccagtgcagccccagcctcccctgtcgtcactctggcctgtctgggttgagcgtgtatcacttgcgtatttcttctcaggcacagcaatggagtctcccaaggactgagtcgcaagactcgggtaagaggggacagtttccaacctgcacgtgacaagccttacactcacctcaccctcctaggcctcagagatccctagaggcggctcagagagaggagagaggcggccatattctctctcctcactatgctccaggcaggtggaggacagataccctcaagcctgccccagaacctggagccctgaagcagccacagacactgcacacactgcagacaagtccctaggcctctctgggcctcactttcccacctgagaagtgccgggggtggacagagtctctcatcttggggttcgttattctccaggtctgatggcagatgcccagacagtggcagtgtgggctctgcacccgctggctccgatctcagctcctcctgggaagctgcatgaccttgggcaagtaccttcatttcctcatggggataataacaatccccacccacaaggttgttggaaattaaaatgaattcatgcaggtgaagccctagcaggggatccacaaacggcagctgcacggaccctcctcgtcctcccaccaacccaagtcccatcccaccagacccacagctccctctggggtgaacaggccagcagcgtctcactaccctccgggccagctggaaggctgtaagtgacgcatcagggctgctcacaggaatgctgcagactgtcttaaaggttgaggcagtggccatcatgaccttggattcaacttccacttacagccatgatggaataacagagacggaattcaccccctgccttagcaataaaaaacccggataaaatctatgaagccatggacaacaggcttcaatcagcacagcgattcctgagagaagaggaacaaaccagctgagccctaggatcaccccactatttccaggctgcagcacagggaggggcgcccccgtggagtcttgtggtctccctgagttgaggagacagggttcactctgagtgtagcagctaggatttgcaggacggagtgccgcaggggagagagctgcacagagtgaactccagagacctgcagagggtcccctggagtcttcagctgatagccgagcagcacacgaacgtgaggaaactactgaggctgagcagggaaccactggaaaggggaggctgagcagagaaccaccggaaaggggtggctggaacaattgctggtgctcacgcaggaccgggaatagtgtatgtgcccccagccagaacagaaacccctcctaacacacaggtcctgcagggggtgtcctcagaaggatactgcctcagcagttgacaaataagtcctagaccaggcataagcaaacttcctgaagaaccagagtgtagacatgtgaggctttaagggccatatgttctctgtcacaactactcaaatctgctggtgtaacacaaaagcagccaaacaaagtatataaataaatatctatgttctattgtttataaaagctggcaagaggcttcctttggcctggggtccataatttgcaactcctaccctggagtgaagtctgctctggtcctgcctaataaagcttgacaggaagccacaaaagcattaaatcgtttccaagtaacctaactgcatcccagaacaaggctccaaaatatttaaaggagaaaacaaaacaaacaaaaactacaaactaaaatccaacatgcccggtatccaattaaaaattaccagacacacaaagaaacaagaaaacatgatgcacatgagaaaaaaaaatccatcaaaatcaaccaaaaaccgacacagatgttagaactggcagataaagacataaaaacagttataactgtgttccatgtgttcaaaaagttaggtagagatgtggaagcttttttttagccaacaaatcgaaattcaagaggtgaaaatgcaacatttaagacgaaaaatatactaggtggaattaacagattaaacactatagaagagaaaattagtgaacttgaagacatgtaagtagaaactgtccaaaatgacacacagaaagactgaaagaacatgaacacagcatcagcaaactgtgggtcaacttcaagccatccaatatatgtgtaattgcagtctcagaaggtggaagggttgggagtgagcgagagactaaaaaaataaataaataagaaaaaaatggccaaaacacttctaccatttgattaaagactaaatccaaggcaaggtgcagtggctcatgcctataatcccagcactttgggaggcagaggcgggtggatcacttgaggtcagaagttggagaccagcctggccaacatggcaaaaccctgtctctactaaaaatacaaaaattagcagggcatagtggcatgtgcctataatcccagctacttgggaggctgaggcaggagaattgcttgaacccaggaggtggagtttgcagtgagccaagattgcgccactgcactccagcctgggcaacagagtaagactctgtctcaattaaaaaaaaaaaaaaaagactaaatccacaggtctcagaagagacatgaaaaaactataccaacgcacatcataaacaaatcacttaaagtcagtaacaaagagagcgttaaaaacaaccagaagagaaaagacaactgcatgtcaaggaacaaagtaagtggacttctcatcagaatcactgcaagccacaagacaacaggcaatatctttaaagtactaaatggaaaaaaaaaaaaatcaacttagaattttatacccagtaaaaatacatttcaaaacaaaaggcaaactaaagactttttcaaatataaaaaagctgagagaattcattaccagcagacccgcactccctcctccagctgcaaccccctcctccagcagcacggttgggacagacgtggctgcagcacctcagtttttctatcatgacatggtcccactccccctcccctcctcctcccctccagggggctggcagaattagtgacatgccatctgaagaggcccaagaaggttctctgggttaggaagttctcctaggatccctgggtggtgctccctgccacctcctggcaatctccaaaccagtttgcccatataatgtctctgaaagtctgtcaccgagaggactagtttagctaacagtctcatcttgcctcccagggtaaagggagtctgtgtacttggtaacaaatgctgaccccagccagagcaaggataattaggccaaccagctggcacgcatacaggtgtcccttttctggagacagggaggggtggtgatggccactcccattttccagagggggtgtcactgtcccagggccaccctgtcaactagtggcagaggtctcctgttcctaggcttttctcctaatgggggaccctgtgtccattccaacctctgaacccacccacagcctcccagaggccacctcagctcttgaaagaaatacctgaccatcagcactgtctggaaggttaatgcctgggcctccctggctctgccatgccttccctgggtggcccatggcgggtcacttcccactctaagcctcagcttctcttcttggtaacatggggagtgaaactggatgaactctgaggtcccgttccccttgacattcatcagctctgtgaacaccttccccaccctctgactattaaggctgaagcctcattaaggccaattaaaggaagatcaggccttctgagcaccaaatggctgcagtgggttggggtcaagaagcccaggctaatcatgcccagagcgctctgaccaggaggctcagcctagcccagtggcatgaaggcactaccctgagtctcctacctcccccagacggacatcagcttcctggtcatggctcaggaatactgcaaagacaaggggctggcagagcttggggaaaggccatgaggtgaccaaggctgttccctgtggatgaggcaagagggcaagatcctttcccgctggccgcaaggagcttcagaatcctcagagcttccaggcttgcaggcgcaggatccagccaaccagaccatcccatgtgggcagcaaacggcaccagctgagaattttcaaacaggaaaatctcaaaactatagattcaaaagcctttaaaacctcagcttctccagggtccaagagcgacagacattggggccatcaagcatcctaatgccccagaaagcctggcttggaaaggacttgcccaaggtcacaaagcacaccagggcagggctgaggcttctaggccacctggtgcccacatgctctctgctgcgttccagtgagcccctgcttgaacttctcccaggacagggagctcaccacttccaccccagactactcacagagagaagctctcaggacaggagtgaggagtgaaggtggaggaggcgaggggagagatctggcatctaccgatgccagctccatgccagacacagagtgttttacacaccacactttttcccatttaaatctcactgactttatgaggcaggtgttagctgttagcactaccatgacactgaggaggaaggaacagaaggtcagagaggccaagcaactatctccaagcagccactaaagataacaccagagctggggctcatgcctgggtcccagtgatacggaagcctgtcttcccaccaccccacatggcatttaacctggcaaggtactcgagcccaggggtcattcagacccttaaaggggactaggacagcccaaccaggccagggcctgccaggctggggccaacgtgggccagggcacagggtgggaccccatcttcctccccagctgctctcaaggcagagggtagctcagtgcttttggatgctcctgtctatcactgcgtcaagacaaggcctgatccccattttacaagtgaagaaactgaggccgagggtcctgcagcatgcaagtggctaagtgggaccagcactctctgctggcccaggggccaggaccctcagctgcagggagaccctctccagccagggagacccaatccaggtccagccacacctaagacccttggtgtaaccttatgaaggccccagccgactctgagcctcagtttccccagctgtgatatgaacatgacggcaggccctggctcttggggttgtgggaaggaggccagcccagtggctgagcagctgcctgtcccactggagtgcccagacgggcaggcactctctccttagagctccttcctcgaagggctgctcccggctctcctcgaaactcttaattaagggaagggagcctttggagcgcacaggagttaacacctgggattactttatcagatggttccccacccactctctgacctgtggtgggagcctgggccagctgtgcgccccacaaggtgtcaactgggccacctgtggcctctggcagtgtggggagctgtcctggcactgcccagctaaaggatgcaatgagtggccttcctcctggtccccaggccacagagctcaccctgttcttgtgagtccccgtcccagccctcctccagagagcccagtatttagctgccaaggagcctcatgaaaacgcttttactgccaggcacggtggctcatgcctgtaatcccagcactttgggaggcagaggcgggtggatcacaaggtcaggagttcgagacccacctgaccaatacggtgaaaccccgtttctattaaaaatacaaaaattagctgggcgtggtggcgcacacctgtaattccagctactcaggaggctgaggcaggagaatcgcttgaaccctggaggcggaggttgcggtgagcagagatcgtgccactgcactccagcctgggcgacagagcaagactttgtctcaagaagaaaaaaaaaaaaagaaaatgcttttactgtcctgagtcaacaggatccagcagtgaggctctggtgctcccatgcaggggtagggctcagaaggaacagtgccactgcttctccagggaatgggagggtgctcagggcctgcagactgggggtctcggcccagtccctccagatatcagttctgtgacctcaggccagttatttgccatctccgagccccaccaagcctcagtttcctcatctgcacaatggagacaacacctactttccagagttgtggggaggattacacagcatggtaaagtgcccgctcagcacctggcgcggggctggcatttagtaagcacctcattaagctgcttctattctctcagagccaagctgtgggccaggacttcagtgtgtgaaggcgggggcctgacagaaaaaatgtggggtgaatcaggcttcgtgaaacctgggttcgactttatttctctgggtctgttcccaagccctggcctggcatgcagagatcagtgttctggccctggccaccggcgcctcacctgccctcagtttcctcaactgtgaaataaggaaggtgtgatctgtccctgccctggggcctcaccctggggctggtgagggatcctgctaaggcccccctgctgtgtcctgttgaggggggctcagcatctgctggaggagcaaccagctagaacatctacatccagctctggctgaggaagccccaacccagcccagcctcacgccttctcaggctgcagccaagtgaggccggggctcgcccctcccaggcgtgatcttacaagcccgtcctctggtatgtagttggaaccccacagcaggttttttcccagataaatcatggctcctggggctaggggaggggcaggcagttgaccttccatcttggagtaggagcccactagggctggagggaggctggagggcacaagctgctgagagtgagacctgggacccacccgcctcttgtcccaggggagtctaggatcacagggcagcaaggtgtcagggctgaaggggcccctaacagtcttcaatacctgttcccattttacagatgggatgaccggggcttggagaggagctggggcttgttccaggtcccacagtcaggcagaggcagagcacggactcttggctcctggtcctgctgtccactagttccattctagtcatttgggaacaggggggactgacagcagtcctgacaggaacacagccgctcccctaagtgctgcgtcacttccctgccccagggtctgcctgttgtgctgacgacaggtaaggtgagtgaggaggcggaaggctgggctgtcctgactcagccccagcagccccagcctaaagcccccggtgggaaggggccagtgtgcggcaaggcggcccaggcagagggatccccatcctaggcagggggcaggcagagttctccctacacaataccagagtgagaaggggaggtggaagcatgggcacgagaggtgattcatggggagagataaggcagggagcgctcccaggaagcaggcagacaaagcgccccgtcagcatccgtcagtgtccgggccctgcccctgtgagcctgggaagcagctggggcaggacagctggaggactgcagtggcctggatgagctgcccctcccagcccctgcctgtcactctgtcctgccagggccagggcacaagggatagcctagagtttgagggaaacacaggcctggtccccacccctctacccgagaactagctaggtgaccttgggcagcgactaaccagtttctacatctgaaaaatgagacagataacactagctgagattataaagcgcctcgcactcagtcaacacttgctattgttattatccctgcccacacatgccacacaagcctgggccacaggtcccaggacagatgtggcagggaaggaagtgcccagggcagaaagcaggggcttggctcaccacaatgctgtggagtcatgaacaaatccctgtccttctctgtgcctcagtatccttgtctgtcagatgaggagcttagtctctactgcctctgaggcccccactgtgggacccttgaggactccctgaggtctgagagtagggagcagtttcagcagtgagtgccccatcctgagggctggaaaagcagaaagcagggcccacctgtccgaggctggaggacatcactcactatggggccatgtagacagactggcacccaaactggagaccagcttcttcctggctatgtcaccttagacaggtgacagcaatcaccttgtgggaagcaaaggaaggcaatgtcaccttaggtgacactaataaccttgtgggacttttgtgggaagcaaaggaagctccaggtggctcatgggactgtacggagtggctgggtcacagctgtagccagagactcagggaggaacctggggtcagcaggtgaagtcctggccctgggagcccctatctggcccatcgctgggcgggggatctgtctgtctgcagaccctctggctgttcccatctgcctccttcctgtcgctgacaaggaggggaggcacagaggagtgggaaccttggcacagcaggtccccctacccatggcctcagtttccctattttcaagatggaagtggaggctgggtaatgggatcccagcaggctctctgtggggactgggttctctagcctccagccagtcatccccatcaggcacagacatcagcagcacttcctccacaccacagcaggtgtggggcgggtctctcagtctgcaaactatgaaggtcccttcctcctccccctcctcctcctcttcctctaactccttccttacttttgtcacccgatattccatcttcacaatagccaaagatgcagcttttatccacaccacctccatcttatagatcagaaacccgaagcctcaaagctgcccagggtcagtcagtgaattgagagcagccaggccaggggccaggcgcccccacccagctagctgacccaactggtccccttgttgggcagggactccaccttcctggaaactggggccagggccaggggccacctcaccagttcttgacccacgtctggtttctctgcccacgaacttccccaaggccctgtcagttagccaggatggtccccgaagccagcattctggtcttctgcaattggctgccctgctctgggactggaagtataaagggattagacccagctaggaacacctcatcccacaacctgaggcccagacctggcttcagaatccttctcaacacagctcactaggtaagctttatctatcaaattaagatgtgcttggaaacgatgagaaggtacttacgtgcagcaggcattagcacctgctcatggtcacaactgtccagcagtggcctagctgtctctgcaaatggcaagcaccccttctcagaatgtgtgacggtgtgtcagccaagaatggccccccacagctagggcactgcatagcccaacaggggtggagaaggggagggccagagaaggcttgaggtcccttccggtggcaaaattcaggtggacaatgctcaggtggactcactccacttccacagatgaggaccacacctccctcacccaagcatcctggcctggaaagtttccaccattgcaaagctcacaaagaggctcagagagggtgtgcaatctgctcccagttgctcagcacagctaggaaacaggcagtgttgaacaaggacctccaggccagtctcagatggacttggaccatgcctattccctcaccccacaacaaaagctctccccaccagagagctcatggtgtgtgcgcgcctttacagtgaatcagagccactctaagggagagtgagaggaagccctggggttcctcccctccccactccaccctatctcggtgccttcttctggggaaccagaaacaccctccaacaataaagaggccctttgagacggggcagcccactgtcacctgctaggacctgggaaccctaccctgcaaagaaactgcggatccccacgaaggtggggaggaaacctccacccaagaggcagccagggaaaacagcagagatccctagaagcccatgttgggctcccgttttgggctctgagtgagcctgtattgagaggggtccggtggctggttgggccatggctccaggagtccccgcgctgcctcaccttctgtgcctggctgatcatcttccgcaccacctctttgatgtgggcctgcccgtctatggggggctgcatgtagacgctagcccgggtcacgccgcggtaggcgatggtgtcgggccagcccaggtccagctgcgggatggagcggtccgacttctggggccagtactccagggagggcagcggctcggcctcgatggggaccccatccgccccgctggcttcctcgccgtcgccgaccccattgtcctcgggcccctgagaggggcccgtgccccgagggtcctcagagcccgggtcgtacacctcgatggtctccaggatgcgcttgagctccagctccgagaggaagtctcggatgttctcccgcttgagcacctcgtagaaggcgtcccggccgcgggccaccagggcctccagcgccagccgctgctcctcgctgtagaagaactcaggcttggactcgctggagcgccagttcacatggttgtcgtccagacactgcacctgagagaaggccatggcgccgcctgcccgggcactgctgccgggggtgggtgggcaaggtccagctcctagctccggcccagctggggcaccgcgcgctcgggggcctctccgcggcctctgcttctctgcccatgagcaatctgcgggaaagacctgatgagcccggctcggcggggagggcgggccgcgcggggaggggcggcgggggcggggccgggaactcaggtgggcgtgggaaggacggggctggggctggggctgggaagatgaggtgggggcactggactgggatgggaagaaagtaagggatcggaacagcggtgagggagcggtgggccacgtcccagggctcagcgtgcctctacgtgcagggaacccatatcccagatttccggagctgcctgaagtcctcgcaacttctgagggaaactagggcagccggggaacttcccagtagcttcttagagtgggaggcggccccggcacagaggcgccccgcaaaccgagggcttccgggtaagggaggggtcttaaaatttccgggtgccggcaacccaggaggcctgcccggaggaggctggggctctgggaggggtccaggagacccagaaacgcggttgcggggcggcgacgccccgcgagacccgggatccggggggcgcggccgggacttgcttaccgagcgggcgctggcggagcggggcgcacacgcggcggctgcggcggcggcgcgaggctgggcgggggcgcgccggtgactcagggccgccccgcttaccccgccgccgccacctgcggtcacgtgccgcccggggcggggccggaagctgattcacccctcgacagacagacagacctggggcggacgcactgcccacggtcccctggtgcccgaattccgaaaatatcagaggcctaagcccaagagctcctggaacacccatcccagagagggacagtgttctccctgaggtcacacagcgggtcaacagccttggcacccccctgtgcccccagggtctgttggtgatcctggatcaaccctggctgtgcccagtttcgccggcgtggcgggaagtccgtgcggctgtatagatacccagctgtccagttgtggaaacaggtctagggtactgggctgggagcccccaggcagggatagggcactgactgacccaaactcagggctttcctgagcagatacccagttctcagtcctaagccctgatcccctctgggaggggtccccggactgcttctgcgtggcgggcagcacccgacctgaaccctagggcagggaggggccaagagggccgctgtgggctggggtcaggcccagctctctgctgagcgtcccctggggttgggaccctggttatggggagcgtggagaccacatctgaaggcaggctttgagggtgggacagcaaagcccattaaatctggcccaacaaacagcccccaccccatcgcgtgccgcagccagtctgcccggcaccaggcccagcccttcctcccatcccccatacttgctctggatctggatggggctggtttgggtcccgtaaggatgctgcttccgtaggctggtgacatctctaggccttgtgccctcaaaccccccccctccaaggccttctccaccattcatggcccatcaggactccttgcctctgagtccactgccctgggcaatgactagcctcctaggcccagcatccttgtggtccccatcactgacccctcaagcatgaagtcctacactctgccatatagccccccaagggctttatgctactgaacatagtggcccctggggaacaggcacacatatttgcatcctcctcctgccccagggccagagaggggaggtgatcccagcgggggagccctgccttgagggtcctgaagacccatttatagcccctctgctactgtggatcccctgtaagaccttctctgagccgcctcagcttctccctgtgttcttaccaatgcacagaggctggagagttcaggaagggagtccaaggcctcactcccacctccaccaccccaacacttctgcagttgatgagcaggaaggttgtatgcacccagttttccccagtagcgacgttttgcataactataatacaataatatcacagccagaaaattgacactggtgcaatccacaaagcttatttagatttcaccagttttttgtttgttttgggacagggtcttgctctgtcacctaggctggagtgcagtggtatgtacaatcattgctcaatgcagccttgaactcctgggctcaagcctcagcctcctgagtagctgggaccagagacaccatgcccagctaattttttttcttttttcttttttcttttttttttttttttgtagagacaaggcctcactatgttgctcagactggtctcaaactcctggcctcaagtgattctcccaccttggcctcccgaagttctgggattataggcgtgagccactgcactggccagatttcaccagttttacatgcactcatttatgtgtgttatacaaccttattatgtgtatagatttgtgtaaccaccattacagtcaagatacagaactgttctgtcactacaaagatctccttctctgtagccatccccacacctcccccgaccaccattcctaacttctggcaaccactaatctattctacaattcaacaattttgctgtttcaagaatgctatataaatggaagatatagtatataaacttttgggattggccttttttcccacttagcataattctccagcaagtcatccaggttgtttcatggatcaatggtttgtgcttttcattgctgactagtattccatggtatggatataccacagtttgcttaaccatttcagtgattgaaggatatgtggggtttccagcttttgattattacaaataaccttgttatgagcattcatacacatatgtatataaacatcaggtttcatttctctggcataagtgcccaagagtgttattcctgggtcctggtagttgcatgttcaaacactgccaaactttttccagagtggctgtaccatttcacattctcaccaacaatgtatgagtgatccagtttctccacatccttgccaacatgtggtgttaccgctatttttttttttttttttggccattctgataggtagatcatatcttattgtggcttaaatttgtgctttcctgatggctaatgtcattgaatctcttttcatgggcttatatgccatctgtttgtcttttcctttgaaacatttgttcatgtcttttgcccattttctaaatggattgtctattttttaactcttgagttttaacttttttacttttttgttttattagagataggctcttgctctgttatccaggctgaagtgcagtggcttaatgatagctcactgcaacctcaaattcctggactcaagccgtcctcccacttcagcctcctgagtagctgggactacagatgtgcaccaccatgcctggctaattgttttttatttttagtagaatcatggtcttgctatgttgcccaggcttatactgttgaatttcaaaagttctttatatattctagctacaggacctttgttgggtgtgtgctctgcaaatattttctcccagtcagtagcttgctttttcatcctcttcgaggtgtcttacacagagctaaagttttaaatgttgatgaggtccagtttatcaatttttccttttatgcatcatgcttttggcatcaagtctaagaactattcactttgttgaagtcaaaatgaaaatgtagagatgaatctctatatttaacgttttatttgggaagaaaaattgcaattcagggcatgcacaaagactgggtggtctttgatgtgtctggagaacacaaagaaggttagaggttttcttgaaagcagaaatgttacttagtgctctttgagaaagttccttggcactggtaagggtttggggagctgaagagttctgactggtaagtgatggtggtaagcaaaattagtcctagatctgtagcaagttatctcagcagctatagataaaactggttgcaggttgtaaaagggagtttctttcaccagccaggctcatagggaattgcatttttggaataatgttatgtaccctgggtgctttcccccactgtcctcttaactctattttagttttgtagacaagaatgatccaatgtgtatgatcaacttttacagcctagccttaggtcctaaagattttctcctattattttccccaaaagtttgatagttttttttaacattttacatttaaatctgtgatctattttgagttaatttttgtataaggtgtgaagtttagattgagggtaggtttttggcctatagatgttctcagaattctgagtttttacagaggaggagacagcctcacagattttttttttttttttgatacggggtcttgcactgttgcccaggctggcgtgcagtgtcacgatctcagctcactgcaagctccgcctcctgggttcacaccattctcctgcctcagcctccggagtagctgggactacaggcgcctgccaccacgccctgctaattttttgtagttttaatagagacggggtttcaccgtgttagccaggatggtatcgatctcctgacctcgtgatctgcccgcctcagcctcccaaagtgctgggattacaggcgtgagccaccgtgcctggcattattattattattatttttttttttttttttgagatagcgtcttgctgtgtctcccaggctggagtgcaatggcctgatctcggctcactgcaacctccatctcccaggttcagcgattctcgtgccgtagcctcccaagtagctgggactacaggtgcgtgccactgcaccttgctaatatttgtattttttggtagagacagggcttcaccatcttgcccaggctggtctcaaactcctggcctcaagtgattcatccacctcagcctcccaaagtgctaggattacaggcatgagccaccgttcctggccagtctcagagatcttaataatcactcaagatcttacagcaagggattgggagagctgagtttgttttgttgttgttgttgtttgtttgtttgtttgagacagggtcttgctctgtcacctcaaggctggagtgcagcggtgcaatcacggttcactgcagcctgcacctcccatactcaaacaatcctcccacctcagcctcccgaatagctgagactacaggcacgaaccaccacgctaattttaatgtttttggtagagacatgctttcgccaggctttgttgtttaattgagatggggtctccctatattggtcaggttggtcttgaactcctggcctcaaacaatcctcctgcctcggcctcccaaagtgttgggattacagatgtaagccactctgcctgactgagaactggatttgtactcaggtctgggagcctttctcctgctccctcctgcaatggcagtgtctggactggctcccgagaatgtgccgggcctggttagggagtagagagcaccttgattactcctcaagggactgtgtccagtgacctccttgggagggaatcattcactcagtcaacagacactggcagaagctaccatatggttgcttgtgctaagcactgttgagacccagacttttccctgaggccccatagtcatagtctgggtgggagacaggacagtcagaggtcatagagttattggtgctgtggaggatatagccccaaagcctgaagggctcagatgtccataatgaattgagaggaatgagtataagttccctgggataaatccagggaagggcagaaggtgggaagggtgttccagggagaaggaacagcaaacacagagacctagaggtgtccaggagagcctggggtgccagaagtctgggtgaaattagtcaaggagagggtggccgagcgaggtggccatagcaaggggtgtgggagggccttaattggagcctgtgataccccggcagcggctggagaggcacggagcgggtttgagcagggaagagcgtgggcggattggtgggtttcgaagttccctttgcttgcttgcagggggagtggattaggaggcacagcaaggaggtagtgcagttcgcctaataatcaaacaggactgggcattggccatggggagggaagacaaggggacgaggaggggcaacccctggcttctggtgtgggccttggctggacggggagctgatgcaaaagtggggcccagtggggagctcctaggcctgcagaagccagtaccctggcaaacccatagacccctgccagctccccagttctcactgcccccagctctgcctccccggggctgcttactctggagtcctgggggactgtgtttcaatggtgacaccactgccacggttctcataaagaagttctttcttgctgctcagcacaaacacttggtcaaaccagtgggactcggggcggtttcccatgccgagagcctggaatgggctgaagaaactcacaaagaatctcctgactcgggctttctgaaacatatatggctgcaacgcctcacctgtccctcccaggagggctgggtcctccgagtgccagtcagcctgcctaggttcagagcccatcagcagtggctcatcacctgtcctctgaatcctggaccccagtgtcctcagagttctgccatggggcccccggctctgtcttggatccgactgtgtcccccaggcaagttatgtcctttctggtcctgaaaaactaatgggggtagaggtggtagggtagggcagctggatcaaacagtgcctgaactcctcatggctctttctgggatcccttctcccactcctcctctcctcctgtgcctttcctccctcctccccaccatgcagtcacttattcattcattcaatcagtgttcccagaaagtctcttctgggcccggccctggaccaggcgatacctgggacttggagatgattcaaacccagtgtctgcccttggggagcctccgtcctggtggggaaggtagactatgtaaacaaacaactgtgattcaatctttggccttaggagcccttgggaggaagctgctactgccttgggggttgggagagtcagggaaggcctcagagcacaagccctttgcaatgggccttgaagcaggaggtaaacaagggtgtgggtgggtgttagacggacagtggtgccctgggaggagggactacgtctgcaaaggcatggaggcgtccaagtgctgggtgtgtgtgagaaaatacaagcaggtcagggtggctcgtgcacggtgctgggatgggaggttctgggaccaactgtcaagggcctcgaatgccatagaaaggatacttttttcccccaggatgccatgggctgagaggtgggggtagggaggagggtcctgagaaataagtaataggctgagagctgtgactccaaagtgtggagaggatggacaggaggctggggaggagcatgggattgggcagggtgggccccagacgggagggggaagaagctatgagcctggggggctaatgggaggagccagggaggtgcctgggggatgacaggaacctggcgtccgggaagcctggagctcaaacaggctgggctggagactgggacatgttcaagggtgccagggtaggggacactgccagggtaggggggactgccagggtaggggacactgccccaggccagctggcctgggggaaggggtgtgagacccgcccttccccatgggctgggcatctaagaagggacgtatcagaagggggctttggagggggcagtctacagagggagcaccaagtcacagaagtgtcaatgccagccgcccctgctgctgctgtgttgcaactctgcctgcccctaaccagccactgcagtgctgtcagtcagcttgtttctgaactcccccgtaatcatcatcttctggttagctctgcactctgggccctcctgaaaaccccagaagcaggggccaaagctttctagaaagtcttttatgggaggaaaaagagaatgtgggtcaactctcttcatccctacgtatcactaggccaaagtcagccccacgactgctaacaccagcaaatctcactgagcagagcagtgaggagagccccacacctcagggctatggaggtaggccggggttctgcccccacacagggcaggaggccgagggatgcctggatttagggttcagtcgggatctggcctgagcctgggaaattcgtgagtcctttcattcaacagatgagccgtgtgtaccaccccagccatgggggagatagcacgaggcaaaccccgtcctctcaggactcacctgccacagggaagtggcaagaaccaaataaacatgtccaagtcctcccagggatgacaagggatgagggaaagcgatgtggggcaaggggacagacggagaatggggtgggaaggacagaccggaattcgggaaggaggcagtcctcaggcgaggcctggggcaggcctcaggtgggagcgaggagggacttgtggggaggggccaagggtctggatcacccagggtcttgtagactgttgagaggctgagtggctggagagtcctgggcatcagctcagctctctgcagcaggaaatagcctggcgtaaagcttggaccccagggttggagacaggggtgtggatgggctctgaccccacgtcctaagccaggaagttggagcaggcaggcctcgccagcccctgagctttcaccacagccctgctgcatgagctgcagctgtgtgacagcacactcaagccggctgcccatggacagacgcgacttgttgacttgtcgctgagtgaacacaaagcccagggaacaggttgagggcctggggcagggcccatcctgcaggcctctctcttctctagcctccatttccccctttggggagaatggctggggacgaggggggcaagggaggctcaggccccaggtagactctaatggcggacctcacacagcagagccaacggcaggtgagccccctggccaagaagtaggatcaggaagaagagttatgatggagaacagcagggaaaaggattttcagaggccatgccctccctgtggctcagattgtgaaactgaggcccaaggccaaatggtaacaggtcagaggcattgatggagcaggtctgggccaggctcctgcccccagccctatcttgcccaccccaggtgctcatgtctatgaggagagacaccaagtgtccgtctctcgaacagatgatgtgggctgcgtggtgccgtccgagtgcctgcgggcctgcggggccgaggtcggctgctccaacatcgcctaccccaagctggtcatggaactgatgcccatcggtgaggctgtgtgggtgggggtctgggtggagggcgtggggttggacttggggcccaatgagtatggggactgtggaggctgccactcactggccaagaaatttggggcatgtcacttccctgcttggagcctgggtgtcctcatttgtaaattggagataatggcatctacccacccctcagcgttgttgctgggattaaacataatgacacagggaaaatgctgggtgcaggcttggccatgctgtagttcccaccttgggccttcgcttttctcttctgttctgggcaaggggactcgctaagccctccagggctgacaccgagccattgttgggccacagtccctctctaggtcttgagttccctctctaagaaatggatggaataagctccaagttcatccatctccatgagcaagacaagggagtgggtggagaaatgttttggggaaaactgtgatttgactcactttcctttgggctccatcccaaccagcttctgacaagtgaacagagagcccagagacacctggaagtcacacagccaatcagacacagaaccgaggccagacaacccagccaggcaataaatggctgtgccttccgggcaggggggcctatgtcaggcttatcctaggacagacgggcaagagtttgtagaggtaaaggaggtgcttaaaattgcaggagttcttgtagacagacttgaactcatccccagagaggggaggcgaccagcctgaagccacacagcacagagtgggcagttgagcatccttccaccttccttagggctcctcaccctcaggccctcttgagcccacaactcccagaaggcctttcacagcaatgctacccgcacctcctaggggagccctcactcccactctggaaaaccacagagccaaggagagaggggatccactatgcctgctgggtcctgccatgcacaggaagtggcggaaaattccagagactggggcactgcatgctggggtgaggtgtgcatcttgcccagggtgtggccttcaagcagaggccccgcccaagccttcctcaccaaccccaccgcaccccaaagtcctgccgctggcctgctgtgaatccctgggcaatctcttcacttctctgagcttccatttcctcatctgtcaagcgggttaatcatgctttcctcggacgaaggcatgggtgtgaaagtgctttgtcaacgccaggctctgcagaaaggacaggcctgatcgcagcctcagcattatgagtaattatggtcgggcctagggttgccagcaagcctagggctcaagcagccagctccgaagtccccacggtttgtccttggcctccccagtctcctcattctgggtcttgctcacctcaaacctcctcagcttctctccctccccgccctctgccttggaggagcatgcaaatggcgggcgggcctcaggcattagagcccaggcgggaggggttcccggggctgtctcaaggccggacagggtcacacatcccccgtcccaccccaggtctgcgggggctgatgatcgcagtgatgctggcggcgctcatgtcgtcgctgacctccatcttcaacagcagcagcaccctcttcactatggacatctggaggcggctgcgtccccgctccggcgagcgggagctcctgctggtgggacggtacgggggtgggggccagtacgggggtgggggaacactacaagggtgggcgcccgcactgactttgagggatgagccggagtttgccacttagagaaaggtggatgccaggaaggagggaagagaagggccagtgtaccccatccataccacctctcacattgctctcctgtccacctctgtgtgatcacagccctcatctgggatgcatctccacccttgagctggattccttctgcaggggccagccctccctccccaaccatgccacagatctctctatctccccgaaaacctgggcccccattcctcctgatggttcccagctgcgccacagagggcccccgggccagcactcaggactggccacacttgggctgccacgtccctcagcctccatggccctggccctactgagctccagcttgtttcctcccagcccagcttgtcccctcctttttcacctcgatgactcatgctgatctttctggactctgcctgtgtcccctcctccgtgcagtcctccctgagaccctcaaccaaggaatgagcctctctccccttcataccccagggacgcttgccagattcttcccacagcacatgtggccattacaggccaagagacctccccgacacccttctccaaatatctgggcgcttcatgaggaccggggctgtgtctggagaacaggtggtgtttggttacatgaataagttctttagtggcgatttctcagattttggtgtatccatcacccgagtggtatacactgtacccaatgtgtagtcttttatccctcacaccctcccagcgtttcccctgagtcctcaaagtccattgtatcattcttttttttttttttgagacagtctcgttttgtcacccaggctggagtgcagtggtatgatcttggctccctgcgacctccacctcccgggttcaagagattctcgtgtctcagcctcttgagtagctgggattgcaggagcgcaccaccacgcctggctactttttgtatttttagtagagacagggtctcaccatgttggccaggctggtctcgaactcctgacctcaggttattcatccacctcagcgggctgggattacaggtatgagccagtgtgcccagcccatcctatcactcttatgcctttacatcctcagaggttagctcccatgtgcacgtgtctatttgcgccctccctggccctccagtcccaccctcttgttgtcctctgagcagtgtggctcacactctgctgctcgggggtccagccttctggcacaacagagcaccccctggccaggagcccagggcacccatcctgggggtggggtctcctccagagctccaggcagctgtcccagggatgcaaaatagtcaggcttctgttggaagggccctgttgggacacgccagaggcgggtgcgagtgagctcatccacgggctcacaggattctccaaaacaaggagcctcccacctctcactgggcaggacacttccatgtccctgtgtcctgggcacttggccccttgaccacttctccccctctggctcccctgcctctcctcagaagctgtgtggcctggggaagaccctgcccctctctgaccatgtgtctcctctgaggccagaccttgctctaagcccctccatgctccagcatcctgggccctgggaactggatgccctcctgccacccagtgtgtgacactggtagcccctgtacctgcccagtggccctcatgtcccctgcccactacttcctggcctcctcacccagactcccacctgcaaccaaaagtcttgacctggcctcctgctgcgccagctcacccagctgcccgtgcccttgaccctccttcccacctcttctgccaagtcaacccccgcccctagccctgcaagcctggcagtcggcctccctgaggagcaaggcacaaggctgcgtggtgcagggcaggttgctcaccctctctgggccccagttctctcagctgccagctggatagagcagaaagggccccgtgccaggtgtcaggctggccagctcaacttcccgtccctcttacagcactgggataccctcaacacccccagcccctcaaagccgtctcagcttcctcctgcccgaaacaccaccattggagcggtatctcctaggcctcgtggtcatggatctctggtagggtgaatggcctgacaacagtctctgtcagggagaggcgaggcttacagagagaagaccaacagcccagaggcctggagaggaggccatcgcagggccgggtgcagtaccatgccggtgaccctgatggctctgtccagctgagcagaggctggaggagccgtcacaggctgggggagagcgatgacccgcccccactcccgtatgcctgccccaagcccccacacctcagtccactgttccgccactgcccccctgccccactctcccctgtctgtgttcccggctgttcagtccgtaaatggggcccacagcctcctggaaaccctgtgcaggactcggagagatctcagacacccctccttgagatgttccacagtaactgtggctgcagcccagggagatgctggagggcactatccaccctgatggtggcatgggagggagtggcattccaggcagaaggagcagcctctgggtttgggggtcctctggcagccaggtaagaaggctgggtaagaaagcgagggcctggctggagtggccccagccctggcacagagatgcagagtctggtgttgggcgggagagctgtgtgcagagggcggggtgggcaggcgttaatggaggcccgcctgggcctttgatgagggcagcgcccgcctgcctgcctggctaggggttaattagccttaatcaaggtggcacctccttcctccaccctctccctcaggcctagaagggaagaaagggagggaggaaggcggacaggcgctgagaggacccaccctagctgaacacatagcctctgtcacccctgccaccacagccagggttccagcgggtcacccaccacccaccttgggggtgaggaatgccaactgacccaggacacaggggtgaggtgctcagccagggaggagcggatggatgccatgccccagcttcatccccttagctgggtcccatgcccctcaaggctcggggagggggtgcctcctcctgaaagccctcctagattgatgtttcctctgagctgctccagcccagtccgagtgtaggtaagaggctcatctgttttctttgctggactctgagtgctgggcaggcaccaggtcccactcatcgccgagttggggatcctagggtagtgtcctacgcaggtgagcacctcaccagtggtttgttggatgaacaagtgtagcatgtgcctgttgtagaggggctcttggcctaagggagaggcaggcaggagctgacacgcaggggacaggaggggacgggctcatgctggcccagcagggctccggcttcacagctggggagtatgggctctaaccccaacccacacctctggctccaaactttgcatccttagtaagcaggttgccctgtgaaggatgtgcagcacagggctgtcggggtggggatgtgccagccagaggtcccagctcccacaaatgccggccagtgtgaaaaatcctagtgtcttcaaataaccaccaggaagtcagtctggcccagatcggggggcagtggtcattcatgcactcaccaaatgcttagtaagcacctactatatgctgggagacacagcaatgaactaaagagatgaggctcctgctctcctggtgcttccattgggaggggaagacaggcagtaaacaagtagacacccaggtaaatgtgcatgtagtgactgggacaggtgctttgaaggagagacaagagggagctccatggcggagctccaagggctggctccgcagagaccccagggcagggaaggagcagacagcacttagagtcaggagctgcacctgcaggatccagggagccaccaaagggtttggagcagggcaggactggccaggtcactggtggtgtggaccagagtccagggaggaggctggagctggggtagcaggggaaagattagagagcaagtcttagtgaccaggggaggtgggagagagctgaagagcctcccacgacgaccgctgcctgccttccactcgcctgcaggctggtcatagtggcactcatcggcgtgagtgtggcctggatccccgtcctgcaggactccaacagcgggcaactcttcatctacatgcagtcagtgaccagctccctggccccaccagtgactgcagtctttgtcctgggcgtcttctggcgacgtgccaacgagcaggtgggcgtcggcggtctgctctccctggggacgtgccacaatttgctcttccctgctgcctgtggggggagccttggtcctcctcccgtagccccacatgccctgcctccctcctccccagggggccttctggggcctgatagcagggctggtggtgggggccacgaggctggtcctggaattcctgaacccagccccaccgtgcggagagccagacacgcggccagccgtcctggggagcatccactacctgcacttcgctgtcgccctctttgcactcagtggtgctgttgtggtggctggaagcctgctgaccccacccccacagagtgtccaggtgagccagccctgacccctgaccctgacccctaacaatttcttactctggtcccattctcatccccgacccactctgactcagaattttctagccctggactacctagccccgtccctttttgaactcagctgccatcttgccatccccaacctttgatcctgtctgggtcacccccaccctgccatcccccacccccaaccctatcctcactcatttcttacagattgagaaccttacctggtggaccctggctcaggatgtgcccttgggaactaaagcaggtaagtggatgaccctaggcactcctccaccttgaccctggcctggaggcaagggcaccaggtgtaaccttgtgtccttcatctgtccctctccttctgcaaccccctccaggtgatggccaaacaccccagaaacacgccttctgggcccgtgtctgtggcttcaatgccatcctcctcatgtgtgtcaacatattcttttatgcctacttcgcctgacactgccatcctggacagaaaggcaggagctctgagtcctcaggtccacccatttccctcatggggatcccgaggccccaagaggggcagattcccctcacagctgcacagcagctcggtgcccaagaactggccaagccagcaaagcgggagccctgaaaaattaggggggaaatgggagaaaataatgtgacatttcaaaaacagcaccaaagcagtcagcattggaaggaaaattagatttctgacggacatcctgatgttggttttactgttttcgttttgaatacacaggctgggtcaggagcagtgagatttgccagcactcagggttctaagggtcttgggccagctctggatggaggaagagccccacatgcccagagcaaggccccccattaagggactgcagccacctccaagggctcctccctccacccaccggctcccaaatgccagagggagcctcttcgccctccctccctgcccaccatccctcaaccatcagcctggcgttcaaagcctttccaagtcccacctcacttttccctctcccaaaggtgcccaggctctgggcaggccctgctcatatccctgatcatggcacattctctggaggaccctcctgttctcgggtaggggccgtgccccacctaggtagccgtcccatgtgggatcctgtaggatctctaaaacctagctctggccccaactttctgtctgccctggaggtttctcagcctcctgagagctctgctgggccccggtctgggcagaacctgggcctaaacaaacaagagccagggcagccagggtctctgcgtggctgggcccagggcttgccctcagagctcacctgtccaacagaagaggagtgtgcctccaccttccctactgcccgcccctttttcagggtcttagggcctctagccctgtggtggggtgctgggtgccccaggtggagctgaagtcatggggctgttgaggagttggtgtccacctggagtctgtccagtgagtttaggtcaacaggtgtgcagtctgtccttcgaggctgagccacctcccaacagcctgaacaactccaggggccttttgagggaggggcaggcaggcccagtgggtggtcagcccaaggtgaacccacccaccatggccagggttccttaggttgagcctccagtgggtgaaacctgggagtcctcaaccttcctggcagatggggccattgacaagaggaggtgggcggggcctccacagactccgccctgtggtgtcacacagctggcagccaatggaaagcaaccagccaggaagccccggagctacccttgctgggtacccttgctgggggacctgggccatcccagtttgtgcagagcggccggaggcagttaggagcccacgttcagtccaaggccgtccactgagccccgtgtgactctgacagagctgggggtgtccatgtcctctctggacctcagttcctgtaaaaaggcccgttggccagatcggccgccgggctgctcacaggtgcacgggctgcacgtaactccgtgggaagaagccaacgcgcccgcaggaccggccccgccaccagtgggggtctgggcgctccaggacctcaatgatgtcgccacggcggaagctgagctgcgaggggtcctgggctgagaagtcaaactgggcctgggcaaagcaggccccaggtgactgcaagaagaggaggtggttagtagggtgccttcagaagccctgcaacccaccctccctcagaggcacccaagagaagtgatttgccacaggtgaggaggggtctcgggcagcaccggagttgaactttaagtccagatcaatggtagtgccaccactgggcctcctgctgcccacacccctgcctgtctgctgtgcagatgctgcatctacatagaacacggctttcccagccgcccagctgggacaatagggctggtgggtcaggggacctgagtcctggtccttagggtgggattttggttaggtccctgcttctcttgggatcttatttacccgactctgcagcagccatggtagcttttgactccaggccacaaagccatgagaatgggccttataaactgtaaagtgacgtgcagctaagagtcgtgtttattgctcttgcccttggtcagccgttgagggagagaattgtcactttgagctctcaggcctgggctccactcctatctatgccccatgtgtgatgttgggtaggtccctgccctttgtggaactcagtttccccacctgtgaatggcagcaggacaggagctctctgcagcacatctgcctggcaccgtgactattgcacccagcaccctggccctgcctgcccaccaagatctcagctctgaatctgcagaatctcatccaggatgggtgataggatcagcagagaagctgtaattagcagctctctgcccaggaaggaggaggcgtcataggtcccaggggactgaggcagctctggagtcgagccacagggtgggtgaccccacggcccgggccagagcgaggtgttgggtgtaggggagctctcagttgcccctgccctagctccatcctggcttcctcacactcttccaaggcagagctggcccaggtggtgaacagggaggaggatggagatctggcagacaggagcccagctggagagaaaagtgccctgaggctgggagctcacagtgacctgggcactcagggtcaggcagggaaggccaacagaggagaaactagtgggggtctctcaaggcactgtttgactcccctggcatatcagaccccagggctcatcctactgaacagagggaacactgaggggatgaactggcctctgatcacatggaaaggtggtggggaggtgctaggaacaagatttggctggagcttctcttcagcggttatcagcctctccccaggccttggccacactccccatctcctctgcagagcccaagctcaagtgtcccagggtcttgacctccagccccaggccttgccagcatccccgctcctgaagaaaacagcctgttggggctaataaccccagtggctattgttggcatcccaatcagcttcagagctggcccttggggctccttgatgaaagggctggctggcaaattgctgttattgcaaggtcaaggggtggatgaccccgaccccccaccccccaccccccaccccgcggcttgccaggatctcgcccaccagcactcatgctgccccacacccaaggtcaactcttccgcgagcagaaaccaggactgagcctaccaggtaagtgtccttggatgagtcactgcactctctgagcctcggtttcctcatctgtataatgggcatgatgaggctcccagagtacagagaccagttcagtgcatggtacccagtatgctcagtgggggtctgtaccttccttcactcaatgaacatttattgagcacctactgtgtgccacatgctattctaggagctgagaacaagctagacagtttgtccccatgggattttccttctgtcctttgcttttctttccctcttctcctttcccacccttgcaagtctcaccatagccgccaccaggatataacttcgaagcctgggctggacgcctcttgcaataccaggctgctggggaagtgagaccaggcccgtgcttggcctcagtgtcagcatctcccctgctgcagatggcaggaggtgcagagaggctcccacaggccagcccccacccgcccctaccttgagcaagggctcctcgtcgcgcaggaagatctgccgcttcttggcgatggtggtggtgcggtagaagtcgaccagctcgttgagggagttgaacttctcctcccacaggaagtacttccccgaggcctcacgcagcaccttgaagtgctgcacctggtctccatagctaggggaaaggacccggggccacctcaggtggtggccgtcccagcctggcatggtcccaggggctcccgtctcactaccacctggaaccagcctgtctcacggtgggacctggagtcagataaggtgcaagtgggagaggccccactgacccagctccacatggggtctggggagtcccatctggcagtggaatatggggttaatttaagggtgtgggctctgaaccaggccactttctcactgtgtgacctcatgcaagtctctcaacttctctgaacctcagttttctcataatgataacatctccgttatggataagtgcacagtgactggcatattggcaacgtgaaatgggtacctctgagtgtgtcgtgatcagagagcatctccttcacatctctttgttgttcccctcagcttggacctactccctgctcccctgctcctcccatgccccagagtcccttggggagcaagtcctagactcatcctgactcagaccaaagcctactgctatgagaggagctcagacctgttgaatgtctcacgtcctccccctcccatgaaccttccgtggcttctcccttggcctcagggtaaactcttaacacttcagactcaagatctggctccacttacatgtccagcttcatttactttatatcctctccgatgaagcaagcaggcccctttctctcatttcccgtctgtgccctgccttccagccagcccactaccgccaaatcgccccgagtaccttctagcccagcggaggagagagcctgctctttcttttttcttttcttttctttttttttttttttgaggcggagtctcgctctgtcacccaggctagagtgcaatggcgctatctcggctcactgcaagctccgcctcccaggttcatgccattctcctgcctcagcctcctgagtagctgggattacaggtgcccgccaccacgcccggctaattttttggtatttttagtagagacggggtttcaccatcttggccaggatggtctcaaactcctgaccttgtgatccaccctcctcggcctcccaaagtgctgggattataggcgtgagccactgcgcccagccacggatttttctctctcatttcccgtctgtgcccagccttccagccagcccactatcgccaaatcgccccaagtaccttctagcccagcggaggagagagcctgctctttcttttttcttttcttttttttttttttttgaggcgtagtctcgctctgtcacccaggctagagtgcaatggcgctatctcggctcactgcaagctccgcctcccaggttcacgccattctcctgcctcagcctcccgagtagctgggactacaggcgcccaccaccgcgcccggctaattttttttgtatttttagtagagacggggtttcaccgtgttagccaggatggtctcgaactcctgacctcgtgatccacccgcctcagcctcccaaagtgctgggattacaggcgtgagccaccgcacccagccgagcctgctctttcaaactggccagaggcagagcctgtcctggctgggactgggcagaggaactaactggaacctctcacactcggcgtgtccacccaggacaggccttgtggggctgggactggaggcggtgcagctgtgggtcaagatcatggcagacatgactgcagcgctgccccgctgtgcttcgggggtggctggcctgcctcacggcccaggaggagcaaattgggccctatgtttcagtttctccaccagtcatccctggggcagcttgctgctttattgatgttttaagatgaaagatttcagataaagatgtgttcaaggccgggcgcggtggctcatgcctgtaattccagcactttgggaggccgaggcgggcggatcaagaggtcaggagatcgagaccatcctggctaaaccccatctctactaaaaaacaaaaaaaaattagccagacgtggtggcgggtgcctgtagtcccagctactccagaggctgaggcgggagaatggcatgaacccaggaggtggaggttgcagtgagccaaaatcgcgccactgcactccagcctgggcgacagagcaagactctgtctctaaaaaaaaaaaaaagatgtgttcaaggttcccaccctctgatctgtatgaggcatagggcaaaacaggattccccctactccattccagtcaaggggtccaaaccacttctaaacacacctccaggcatttgcacacagagtgtcctccagctagagggaatttttcttgaaatcctcatgccccagtggggaaactgaggccccgagtgcagccgcgacctgcccagagccacaacagcaagaaaggtcagagctggggccacatttgagctcatacatgtaaaacgttgcctaatgccctcctgattggttattatcacataacaatagcaataataattattccaattatgctattactattgttccagagctcatcattccaagtccatttctactttgccatgttgctacctgggctgtgccccccaggaggccctccctccctgcctcatcctctctgcctggccaaaccttagctacccttcccagctctatagccagcctgcctggacttagaccccagcccacctctctgggcctctgcgtcctggcctgccaaatgtgggcgatagtgcactccttgcaagggagctgagaggcctgggaccctgggggctgtgtgggtgctgccaacagagccaccctaggcccacctggctgggctaggggctgtggggagaacacagaacagtcccagctcccaaccagaaagaagacagtttaggaccccgagggagggcacctgttcaggtggctggcggagctaatagctgggaaagcctggggccctgtgagccgggtgaggcagggtaggggcacaggatggccactgggaggtagatagcccctcagcctcctgagccacaggctagggatctttttgttcacatttgggctaaatgagatccaaccaccagtccaaagcacttgatgccttgatgggacacatgcgcgcgcgcgcgcgcacacacacacacacacacacacacacacacacacacacacccctacctctcctgggttgtaaattgaaatctggttaaacaatttggtcgcaatacatttgcaagcttgggttcacccacagcctgagttccttcaggtctatggttctcctgaacaagagggtggtgtctgtcaccccagctgcccagatctgctgctccatctgtcctatccctgcctgtggttgagtttctccaccagtcatccctggggtggcttccttccttattgatgttttaagatgaaagatttaagataaagatgtgttcaagtttcccaccctctggtctgtatgaggcgtagggcaaaatgggattccccctactccattacagtcaaggggtccaaaccacttctcccttttttttttttttgagacggagtctcgccctgtcacccaggctggagtgcaatggtgcgatctcggttcactgcagcctccgcctcctgggttcaagcgattatctcatctaagccttccgagtagctgggattacaggcacctgccacaacgcctagctaatttttgtatttttagtagctgggattacaggcacctgccacaacgcctagctaatttttgtatttttagtagagacagggtttcaccatgttggcctggctggtctcaaactcctgaccttgggtgatctgcccacctcggcctcccaaagtgctgggattacaggtgtgagcaacggcgcccagccccaaaccacttctaaatacacctccaggcatttgcacacagtatttcctccaactggaaggaatttttcttgaactcctactcatgcctcaaggcccaggtaaaatggcgcatcctgtgagagctgcatcagaccccatcacgcagtcagggccttcttggatccctcagcccctctcatagccttcttgtaacttgctactcaaaatgacttgcatatgagacactaaaaaggcagggaggcaggagtgggccctgaaggtccagtctagctgggactcagcaaacagagcatcactttccaggtcttaggtcctcattgcgatgctttgttcttgaaacccacttctgttggttctgaactgggattgcagcccaccaggtgttctgaccctgaacccaggctccggtggccaacccattgctctaagatgcatccagccctcagggtcacacagccagaaagagagctagttcatgtgctcgtgacgcggaggtgggtgtgcaggcagatgtgtgtctcctgccctgtctggccttccgaagcctcccagaggcttccgagaggcagcctctgagccccatgactccctagtgccacgtgctaaccagcccagggtttactgaactttggccgtggtgcctggggaggagcactgcttcaagcagtggagtgacggtgacccacagctgggcaggcgagaagcctggagacagggatcccagtggctccacctctggggcaccgggtacccaggcagaaggccctgactccctgttggccccgaggaggggcctgcatacaggtggccccactcctctgggtgaggggacagaaagggtgtggtgggtttgaaaatgatttcaaacccaaacgaccacaactttgaattttatggtatttgaagttcatctttagatacttggaaagttatctagagcagatagaacgttatctggagcagttctttgatcatatagtagagtcagggagtggagaacaggagataagggaaagggagccagggacccagggattctagggctttccaacctgggaactggagaattctcaaatctgggaaacgtgcatgtgccagcccctacctagtctgtgtgtggcacatactaggtgctcagtaaatggcaaatcttgccccttctcccacctggtccaaatgtcctgctttacagcagaggacagtgaggcttgggtgcagcccctcctgctgagccagcccctgcctgaggccaagcggtgctgtctctgtcatctcacagcccagcatcccagctgtcactccctctcccagcctggcccttttccctagcctggctgggctcttgctcatggccctcaccagaaataatgccttttcccttttctctgtctagtcttgaccttagccatccttcaaggcccaggtggagcctcaaagcatttgagaatcccccagactggggctaccctctggggcctctccagacctcatctccactccccttcccaaggcctgtgggaacttcagggcttgcaggaggaactgaatctgagtccagatggccccggaaccgggagggctggatccagtgcagccggctctgctgcatgagcctcccagagccagaggagggagggggcactgggattgtgggcctgagttggtgagaggagaggctgctggagccattcacttcagtgggcagtgccgggggtgtgagagcgtctccattgtgtctgagtgtgcattcctgggatgcttgtgtgtgtgtgtctgtgtgtgtctcccactgtgtggagtgactgttatgtgtgagtctctcactgagcaatcatgagtatctttgtctctctgtgtgacccctacatccacctacccaggggaacaaggggctaggctgacccctgggctgtcagaaaagccccaaggaccaagtcaggcctaatgctggcagcagccagtcctgcccagcgagtttttctggcctggtggcggcagcagcagcagcagcagcagcagcagcagcagcaaaggtaacagtgtcagcccagagaggaaaaacaaggctggggtgggggcaggagccctaggacaccccctccaccaccccaaccagggcttgtggacgtgtggacccacctgggtgctaactgcccgctgggcgatctccatcaggcatggcccctctctggcctcagtttgcccatctgtgaaaaggaggggtggaacaacctgttcggcagcagacaggaaccagagtcaagctgagcttgggaggggcaggacactggtgcagacagactcctgctgggtctttggagctcagggagggtgggtggaggacagaccaggtctgtcagggcacagaggtcggtgggcaccagctctaagttcctcgctgtgtgaccttggggaagttgctgcacctctccaggcttcagtttccttacctgcaagctgggcttctggggatcaggcaggtctcctcacttcctccctgtccttgcctgcagccagtcccttcctcctaaaattgcaccccccctccaccacttccctgcttcattttctccaaagccttggtcattgtgtaagattttatacaatttcctaatcacttattgtctgtcacccagtagcacatgggcacttgagggacagagagctttgccctattttgttgctggctgaatccccaggccctgggacagggctggcacacagcaggggttcagtgaccagatgggcagggcaaacacatgtgcattgactccagggtacctctggctagaaaggaggcaaatatgtcacttggagacaaactgtcatttatggcagaagagtccacagtagcttggataggagtgtggggcaaaagttaggcagcccagacattgcacgccagccttggcccctggcccgctgcccgccagctcagacatgctccctggaggaggagggggacagccctttgtaaactcataaagggcagctagctatggccacagttgctctaggaggcagcatgaggcccataaaccccacctctgacagctttacagggcttggtgtgagtatgccagagatgccatgcatagtgccatcagagttcccaagtaccaaccagcaagggtggaagagctcttacacacaaatctgccaggctgtcattttccgaggtggccatcaggtcacccggcttcccagcatctgggttccctgactccctgtgctgctgcctcttctctaagagtgttggattcatgggccgggggtggggggcagccttccaggccaggaggggctccctaattcctccccagcttggtgtgcagtccttggagccttaatataattatgataactggcacttatcatgtgccagtcatcataaaaaacacgttacatagctgtccattttataaatgaggaaactgaggctcagaggggtaacttgcccaggattatacagcgagcagctagcaggtgtcagagctgactgttgctcaaaataccatgctcttagccacatgccccatttgagtctcagcttccaactctgacccctgcttggtggttgtccaaggaccactgagaggccccatgacagatgatggacagaatgggagcaggacccaggagcctgggcccaggcaggaagaagccaagggtcaagggctccacctgctggtgctgtgtacaacccacagccagccaagcccaggaagctcctgacagttttgacctgggcacacttggccagtatgccttggacaaaaggttcgggggcacaggccaggatttctctgagggtcgcttccagatcccttcccaggaaacaccggtgctggctcgcctgctcaagaactgctccctaagactgtccatcttccctcctggtcagaaaacacgttgttatccaaacacacccctcgcttccccacctctagatctctactcatgctgtttcctgtgcctggcatatcatctactctccttgtgcgccaaaatcctactcatgctttagagcccaactcagatgtcacttcctccctggtgccttcactatgtggaatgtatccactgtcattgaatttcatttattcatttgctcatcatagagacccctgggccaggctgtgaccatttccccttcacatgcctctggtttgtctcctgtttcagtcctgccttgtggttttcacacagctgatgctcaataaatgcgtgctgagcaaactcacaaggctggggtgttcaggtctgatcatgtgcgtgtgcgcaggtggctgcacttacagagagacgcctgaagagggcagcacactggggcgctaacttggagagtgaggccgcgtgatttgttagaggaggaagccggagggcggagggagggccagcccctccccctcaactcgggctccagacgtagtttgagtcccctgtgcccccactttgctgggtgaccttgggctttggggttggttccaggagccactcagccaggccagcccgcctggcggacgccattcccaggagatgaccaggccctggacagccgacacttggaagactgccacgtcctgcctccgcaggagccgcagctccccggggctgcagggaagtggtggctgggctgggggggtggggggtgagcccgcggggactccaggctccaggtgcccacaccatcccgggggtgggcagtcagggccaagaacgcacagtaaacccccagtacacacaagcgcacacacgcacatgctgacagcactcgcatttttaagatggggaaatagaggctcagagggggcatgcgcgttcctgcccctcaggatcaccagcctgcccccaggagaaaagggaagggaacaaggctgatggctggttccaccaactgggcgcccgggctcagggtgaatgtggggggctgtgacccctgagacgttggatctgcctccctggtatggtttggatgtttgtcctctccgaatctctcactgaaacgtgactcccagtgttagaagtggggcctggtggggggtgtttgggtcatgggacagaccctcatcagtggctctttgcagtaatgactgaggtctggttgttgaaaagagcctggcacctccctccccgacttgcccccgtctcgccatgtgatgcgccggatccccttccccgtttaccatgcgtaaaagcttcctgaggcctcaccagaggcacatgccggtgccatgcttcctacacagcctgtagaacaccaagtcaaataaacgccttttctttataaattacccagcctcacgtgttcctttatcacaacactaaatggacgaacacacccctagagccgccttcctgaccataggctcctattccttgcgggtgcctccaggctcaggggagctcgccaccctgcagggctagcagcagacgtgctgatcccacacagtgaacagcttgagcttgtttcaaaacaggccggctgaacacatgggagtcacagggacccggcagagcctggaaggcatcaggtgggtgggaatgcttttcccccagcaggagccctcatgggctcctggcccagcctgtctgagtctgcctttgtctgcttctttgggaccccctgactccaagccccatcaagcttgcatctccacacccagccccagtgttagctatcgacccaggcctgtatttctttgtcctttatttttatttttatttttattttttgagacagagtcttactccatcacccaggctggagtgcagtggcacaatctcggctcactgcagcctctgcctcccgggttcaaatgattctcatgtctcaacctcccgagtagctgagattacaggcgtgcgccaccatgcctggctgatttttgtatttttagtagagacggggtttcagcatgttggccaggctggtctcaaactcctgacctcaagtgatccacccgccttggcctcccgaactgctgggattacaggcgtgagccaccacacctggccttcatcctttaggagatcatgagaggccactctgccctcctctggggccaccccttccttcatcccttcctcccggctggactctttaccaccccagtgctagctccgctggtggcagtaagagctggcatggtaagcgcctcctccattccgggctctgtgcccacagcagccctgagagctggtactgctggtggtccccccgcacacctccatgcctgggcccaaccatttctctgtgtcccctcatcagcccctacccgtacagtcccagaggccatcatctccctcctgactccccacgggcctccctgccaccacgctctcccccaacagttctttctcctcacagcactcagagtcatctgctaaaaatggagtccaattacatctctcccctgctcaagaccctccatggctccctattgctctgagagaaaacccgacctcctttcaggccctctgtgatcactggatgtgggtggaactccagcccctgcccttcgctcactctgctccagccacgtcacctcctccgggctcctacatgccccaatcacattcccacctcagggtctttgcaaatgctattccctctgcctagaagcctctcttcccaggtcctcctcattcctgggcacctgggaagcctccacctcctagttcagatctttgctgcaaggccacctcctcagagagccctttcctgaccaccttggttcattctgtattaacatgttttcttgttcactcacaaagactgaaacccacgacagcagcaactttgttttttttcccatttggtttccccagcccctagagcatcctggcacatggcacctaatcaataaatattccttgaattaatgcatctagattctaccaaggcctaagagtaggaaggacagagactaactaggagcctgaccctgtctacccccacccccattcctgctgctactttccagcctggattcctcaatcactccagggtggccctttaggattggattctgtgctgcccagaggctgccacaccacagctgagggccgccctaatacaatgccagatgttccccagcacggccaccctgcctccatgccagggactattctaattgctttaaatataccaacttgtttcttccgtgcaatagcctattttacatgtgaagaaacaggcacagagaaggtaagtgacttgcccaagctcacacagccaggaagtggcagaactagcatttgagcccaggcagcctggcctcagggtgcatcttcccaactatatcacatagagtgggaccctgtgcggagcacatcctggacacccgccctgggcgtttcagcactctcctgccctcaatctcttgccacatcaccaccctggacatcgccctctcctgatgaagaacctatgatggctcctatactcgtagaagcctggaccttcagcctggcattgaggccttgcacagctggcctgatcctgctttcccaacacaccccactgctctgggctgcaccctggggtgcccagaccaccgcctgtgtccggaaggcctctgcccggactgctccctctgcagggatgccattcctccaccctcactccgtgagcccgtcccgggccccaaggctcagctcaaatgctgcccaaccccgcccaccctcctctgcacacacccccaagggccagagctcacttcacagacacagagaactcccctggggagctctcactctcccggatcaggaaggctcccagatggttccgcttcatcagaatctcttcggccagctgccgggaaatcctgcccgagtaccacctgcggagagagggagccggtgaaggcagtgtgagaccaggctctcagccagcctcccaccccgtgccaggtgttcaaggtctgagacaagggagatgtgattgcacccattttacagatgggaaaactgaggcacagagaggtgaagcaatacacccacaatcacacagcagaggcaggcaggagctggaacacaatcccagcattttagctcctgaggccagcctctcctaccatgccagcaaacacatacccttatggaaacagaaaagtcacactccagtgagccacaccccagccaacctcagtctaactttccctttgagatggtagattctttaaagtcaaaaaataaatcaggctcggtggtgcgtgaccgtagttcagctactcgggaggctgagatgggaggatcacttgaggccaagactttgagaccagcctggggaatagagaacctcccacccccattccttaaaaaaatacttctggccgggtgcggtggctcccgcctgtaatcccagcactttaggaggccgaggcgggaggatcacgaggtcagaagatcaagaccatcctggctaacacggtgaaaccccatctctactaaaaatacaaaaaaattagccgagcgtggcggcatgcacctgtagtcccagctgctggggaggctgaggcaggagaatggcatgaacccaggaggcggtgcttgcagtgagccgagatcgcaccactgtcctccagcctgggtgacagagcaagactccgtctcaaaaacaaacaaacaaacactttttttaaaaaatagagtcttgttctgccgtccaggttggagtgcggtggcatgatctcagctcactgcaacctccgcctcctgggttcaagtgattctcctgtctcagcctcccgagtagctgggactacaggtgtgtgccaccgccccggctaatatacatatatacatatttttttgtatttttagtagagacagggtttcaccatgttagccaggatggttttgatctcctgacctcgtgatccgcccaccgcagcctcccaaagtactgggattacaggcgtgagccaccgcacccggcaaaaaaaaaaaaacttcttaagtcgaaaatataaaaacatgacaaaaataatagtagctttgatatggtgaggaaatatccattccacagtctcaggccacctgaatttttttcacaggcacaagttccttttgctgctgaccaaacagaactgggtatgcagaagttgcctggtaaatgcttagactcttgcaagatccccagggtctgggagtgaaactccttttccagtcctgcttatcttgctgtgtggctcctggtagctcctggtagcccccggcctcttcaggaatttgccactgctataggctgactttctgtcccccaaaattcaaatattgaaacctaatcccccatgtgacagcagtaaaaggtggggtcattgggaggtgattagcagtccccctgaatgggattggtgcccttatgaaagagaccccagagagctcacttgtctctctgccatgtgaggacacagctaaaagacacagccgtctgtgaaccaggaagtagcctcatcagacgtgaatttgccggcaccttgatcttgaacttcagactccagaacagtgagcaacaaatgtctgttgttcataagctacccagtggatggcattccgtgacagcagcctgcaggactagaacacccaccatcggaggggctgtgtggtctctgactggctttcctaactccagtgttttagcccagctttggctctgacccctttattgttcggatggggaaactgaggcccagagcagccacaggtctcgtggtggcaccatgacagaatgttccccttcactccttccataaatgctcctctccctgagtcagactgagctcggcacaggtggtggaagccaggcggggcttttcctgttgtttcggatgttgatgagccctcggggctgagtgcagaaggcgtgcggtgctgcacatgccgctagtgtcctggccatgtcccggcgccggccttggcaggatgaaggctgctcagtacagacctcggggccttttttctggtgattgacatatttggcctgggttcagggcaggctgaggctcccaggaacagtctgactcccagtggtgactgatggagcagaggggtagacgccccagcgcctggccttccggaggcatgactcctaggtgcgcattctgtactgtctccagctggccctggtccccagccagatggagctccggttacccccagcagcgatgacgccaacagtttgccccactggctcccccacttccctgtcctcttctccactgttatataaattccttgttatcaggctcgtgtctcagggacggcttccggagaaacccgaactcctagacatgagattctagaccactgctgcccccaaacgaatgggggcccctcggcccctgtcccagcgagtttccttctgggaggggacgtggggaaggtagccgctgggtatagggctcagggcaaccatccggagagctcagcctgggtcttctggggtttggagacctgaaggcaggtgcccagccagcctgggtgtctcaaggccagaggtgaatgccacaggctgcagcaggaggggagcgtagggggcccagggttggggttaccaggcaggggagctgcagagagcttctccaccaggaagcccccagctccgtcccgcaacagtgcccagcgtggcccagggcgggagtttcctgagggggcaggtttcttcgaagaacccacaaaactcctcaggcggcatcagtgtgtgggtggctgttgccctcagagagcatcgcaatcacaccctcccaggagttcccacgtcccctgccagccctgcccccaccatggcttgacggatggaggcaagaagaaagcacttcctgaaactccagggcccggctccttcccccacaccagtgtcactccatttgtggccatctcgcatcattcctgttttactgatgtggaaaccgaggcccagataggggcagagacgcccccacaccccaccagattgcatagcaagtgcatggcctgggactctcccagtcccacagctgttcttatgagcttccccgctgtcctccagggtgtcccagcccagggccatgccacacggctgcagtcccgctccacctcgtgccagctgtgagatcctgggggggcactcaacctctctgtgcctctgtctgctaatctcaaagatggcgatggtggtgctcagctctcagggccttgggaggatgcatgagctgctcgtacgcgggtgtttgctgctccccccacacatccccctgccaggcttgtctctgccttccctggcagacatctacttgaacttccaggcccagcgggccacacccttcctctaggaagccatccctgactcccatgggccgtgaggctgggtcacttgccgctgtggcccctgctgatggggctggctctggagcacttggcgtacattgtgcctcccccgggggctcctggggttggcaggggtgagagggggtgcccagggaaggagtgggcctggcataggcacgaggcctacctctgaatttctgaggccccagccctccctctgaccccacacctgaggcctttatgggctaagtcaggtatggagctggagtttccccatagttattttggggagcaaggcaggtgctgaggttagtcgaggacacacctgggcatcacttcaggcaggttactcgggggcttgaccccatccctgctgtgtcccagacacaaatggccagagatgaccccagaggcatgggaggctgaaaccctccatggctcccaactgccctgctagagtcttgcctcgaccactggcatcccctcgacaggcctggcccggcactgcggtcttttgtcatcttttctcccctgcctgagcaaatgcgaccctctcagcagctgtaggccagccagccttccagccattgccaggccatttcctccacctgaaggcccctccctgacagcttggcccagggggattgctcccgttcatgccctctggcatgtctggatggtcccattggcttacaggggcctggggcactggctccagcttgtggccctgggtcggattctctcgtctctctccctcttcgcacacccccctccctctcccccttaattgacagaaagatcacagaaacctgcccaatgtcacacaaccacgcgggacatagtggggcctggaacccaggctgccgccccagatgccgactggaagctgcagcctctgtgggggaggctgggagtgcctgcagcccgggcaggtggctgaggacctgggtcggagggggcctcgcccagcacaggaagctggaggtggtggcagctttggaactaacttaaagagagataaagaggaaatacctctcatgccccaccctggccctgcacctccttcccttcccaccgcacagccacacacacatctcagctcccaaactgtcccgccagcctgcttggccctgtcacctgtctccatatctgactgagtcctaccataacacctccatggctccccacatggcttggcatttgggggcctcctgccagtcccacatgccacaagttctctctcattgctctccctttgctcatcctgaccctctcccagggatgcctttctctttttctacttaaccaactcctacacatccttcaaaatctcactcattgccacctcttctgagaagccttccctgagaaatcaccttaatgctcactgtcttcccatgtagtatgtccttcatgtcctctttctcccccagaacacagctgctctgaccccttgtgtctccagcatcacccgggctggaccccctggaattgtggccagtgtttagtgaatgactaagtggctgtatcttggggctgcctcagctgccatttaaagcatatccagttggtttgcatagatttcttgggccccatgcctgttctgaggctgggccctgccccagtcattctcagggcagcagtgttggctgccacctgcccagagcccaacctgggacatccctaggctggtaggtcccaggccccaggatagctgggccccaggcccagttcttgctccaccctggtaccagactctgctctgccaatgtccaactcccccccagactccaaaggcagggcctacagggtctgcttcccgcccagccctctcccagccaccacccagggccgggccagctctcagcaagagctctagaaccctccaccctgaacagattggagcatctgccctccttgagttatagataggaaaactgaggaacagagggcagggacctgcctgaggccacacagcagccagtggcgcagccagctgaaagcccagggccttgtcctctctcggggacctcctggacattctccagtggctcacgtcctcagtgtggaagcctgggcttgccctgactctgtccccactctggggaagtcctcagaactcagtctcctatgcctgcccaggctggtggcctctgtggagcctgggggccccagacagatggacagaggcccaggagtgagggggtcccatggccaggagagatagagccacggggatgggatggggctgtccactcacggatggggcttgacgcggatgtagttcttgggaataaatccctcgacaccccggagctcggccttgtaccagttctggtcatcctccatgttcaggatctgtgggcaggagacacaaagccactcagtcaccgagaaggaacaactgtcacccccggaggccccactgcacgccaggccccaggtgggcctcgcctgcaccagcttctgtgcctactcacagagcagggctgggggcctgggacaggacttgcccacggtcccaagggctgaattagaagccctcgttcctcagtgctgcccatcccctggccccaggacagcccatcctcaggtgattcacagactccaagggaggcacagtcggggactcgtaggaggcttggggtggctggagctggattctcaggctccgacaccaggagccctgcggaccatggggtttgcaggagcagaactggggacctgagttccttcctgggttgtgcccccgagtttggggggcccacagcacttacatgccacgcactgagccttggggtgaaggtcgggggacccggcctgagcacagccaccagtggtcacctagggtccctcgcatttagacagctcaggggtgacaattcagtggggggacgtcaggctctggggagcagataagggggcctttggtctgagacagactggttctcagccctggcatggcctgctcggtcacacgggctcctcttccgagcctgtgaggcccccatcacaccacaggtgggcccggaggaactgaaatagccagagccggggtgggagtccctgagggggagcaaccaagcgaccaaggcggggggcggggccgggcctgggaggggcacagcatgaggccgggggtcctgcctccattccctgggcacgccttccgtctgtccccctgattctcatatagcccccaaggtcaacatcaccaaatgctattttacaaataacaaaactgaggcccacaggggaagtgacttggccaaggccacgcagcaggggagaggcagagcctgtttggtcagtcaggactctgaggcctggagtttttggctcactggtcaagggggtcctggcccaccaatttttgcctccagtcctctttgtcactggactccagcttgaggggacatctctcctgtgaggggacatctctcctgtcagtcctggagcaggttccaatgtcagctcaatccttcaggggtacttgagagaaaaaattgggcacggggtaccaaaggcccagggcgggccaatacaggggcatcaactccagcagtgatattttgccaagagtagctgggattggcctcctagggcccaggcctgaggccccaccctcacaggtggcctctgcacccccatctccacccccgctttgtccaccaggccaggctggctgagcctcttccttcctgcccctgcagcctgggccaggtcagcagacccaggggtgaacggaagcaggtggctgactcaggaaaactttcgctcaacacaaaacaaaacaggccgggcgcagtggttcacgcctgtaatcccagcactttgggaggctgaagagggtggaccacctgaggtcaggagttcaagactagcctggccaacatggcgaaaccccgtctctactaaaaatacaaaaaaattagccaagtatggtggcacactctcataatccccaactttctcaggaggctgaggcaggagaatcacttgaacccgggagctggaggctgcagtgagccgagatcgcgccattgcactccagcctgggcaacagagtgagactccgtctcaaaaaaacaaaacaactcccccaacctaaggagaaaatgagggcctgtaggccacataccacagccatggattccaggaggatgccctgaagcctggggctccagaacattctgtctgcttctgactctctctgtggccttggcctcagtgtcctccctcgtctgtccaatgggtgcatttatggcctgccctgcatgcagcagtgcggacactgggtggaatacgtctcatgcagtccctgcttcgttttgtctccttgtcatctgcactcagaggactcaggaatgtcccattggttacattagctaatttctttttcttttttctttttttttttctttttgagatggagtctcactctgtcaccaggctggagtgcagtggcgcaatctcagctcactgcaacctctgcctcctgggttcaagcgattctcctgcctcagcctcccgagtagctgggactacaggtgtgtgccaccacgcccagctaaatttttgtatttttagtagagatggggtttcaccatgttggccaggctggtctcgatctcttgacctcacgttaactgatttcttactgtgaacattgtttgaaagccccagaccctctgagacccgggaattctcacaagggagagaggccaactcctccctggaggagtatcactgctcaaggtgagaggcagaacttggcctgcccctgagcctttgcccacatggtgccctccacccaggctgccgccccactttaccatcccagcccgatgcagttgctgcttgatagttgtttactgagcacctactgtgtgccaggcaccccacgacagagcagggaacaagaagctcacattctagtaggcagagacagaccataaacaagggaagaaacaaataagcaaggtagtttaatggagcagtaagcgctgtgaaaaatggacatcaggtgacagatggagaatgtctggttgggtgggagcagggagattgtcaacacgggacaggtggggtggtccagaaaggcctctctgaagaagtgacatggaagctgagacccgaattacaagaaggaaccagcggtaagaaaatgtggggaacagtgtccaagacggacggaacagccagtgccaaggctctgaggtggggccaagctctgtccctgaaacagaaaggaggccagggtgtctggagctgagggagggaggagcagatgtcataagatgtacgggggaggaccaggctctgagtcatggccactgcatggagactgggctggggagcagggattgttgcggggaggccttgggagccaccacgcaagcccaggtaagtgacaatggaggcctgggctggaggaggggcttcgggtaggttttgccagagttgccgacaagacaatgacaggcagcagaaagtaggttcagggagcccagggctggctgtgttgggtctggaccgtcgccctttcccatggagatgtcaaggtgacatgggcttcctgagtctgggtctcatcatccaggctgctcgtgcagagatgggagtgaagccactaaccacatgcccctccagctggcaacagcatgggggtgcgtgcacccagaaacgcctggcctatcagggagggaggctttgtcccagggaggtgatgtttggggccatttgtccagggtgagtccatgagccagagttttcatccaagaccaaagttcagatttcaagaacgggcttcatcgcccactctcccaggctggactcaatctgtaggcaggcagtgccatggcaggggctggcccacagggagcactggaaaatacttgctagacgagaggacaggatggtcgcggagctcagcttccaccccagccacttgatccctccaagcctggctcaacgcctcccgcgcaccccattcctatttcatcactgccccactccctcccaacaccacacttgggtctagagacctcgaagtgctctcagatgagaaaccaagacttggatccccgcagagggtcatgccttgggctcacagccccagtgctcagcctggccctgtccccatctggccacatgtccacgaggccgacagccagcactgcagtgaccccaggtgccagcaccagcaccccagcatagagaagaaggaattgctcctcctcctctggaccccaacccccagcccagcctgttcagaccaagcgcaagttccacagccaaagggacacgggttcaaaactgactccataccgagcaggtcatgttgcctccctgtgcctcagtttagtcacctgtgaaatgggggtgccagtccccattgcttaaatggtacatgaggtgtgctgctgagttcggggcctggctatagcagggtgatggcacagggagctctcccgtcttgtgcttgaagcttgtggccaagggcagcgcccagggctcagcgcagaggagcatccagtctaacacccattgctccagtggggaaactgaggcccagggaagggcagtcacttccctagtgtggtttactggcagttccagtgcacacgtcttggcatggccactcccagaatcctgggcatggctttcatatgcaaacttttaagcaaggacatttccagagacacattccacaggcccaactgtctagaccgtcttggaaggctgcaacatctgtcaaaagcggcccagacaaggagaaatgaacggtggtatgactctattttcccttttctccacactactgggaagctcatccttgacactttcatcttagctattttagccctactaggttagcatgtgtacttatttctttcctaagaccttctctctctccctctttctcgctctgttctccattcccatactctgtctctctctctagctctcattctctccctctctcaacaattttcttttcaaactttttcctggaaaactgggggttgaactaactcctgccagacactgtggtaatatctcatcgaatcctcacaacagccccaaaggagggtcattagttatctccccatttcctagatggagaatctgaggctccgagggaaaaggtggcttgtccagagtcacacagccaataactggagaggctgggcctgtcttccaggggccacagtctgcttgggacagtcccaggtccctggttcctaaatccacccccaccccgtgtggggccaactcagcaggctccagcccccctaccttgagtgtgtctcccttgttgaaggccagctcgtcgctctctgtagcctgaaagctgtacagggccacggactccatgccgctgctcggggctccagcagctgggctcagagctgggccgacagcttcctgcttcctctgcagtcgaggacggtcttcctttgttttgagtgcgcgtttgttcttttgaagttgagactgaaactgctcctgatgggggagaaacaggaaacagacatgtcacagagcagggagggcttgtgagccagctctgtccctacctcagaccccaggtgccaggaatggcccttggggagtctccctgaagctctgggagtggggcccccttgtgcccatgttttatcatccgtaaaagtgaggtgcctggaggagaagtgccaaagctgtcctgctggctcaggcactgagtctcatggcaccagatgctggcctcccttcaccaatctgccaatgactctccatcttttcctaaaccctgatgcctcttgtgatgccctgcctcctgctccttcaatcccaagctcctcacctggcattcaaggcccttgcaatccaccacctccacctgcccctacaaacagcccccattctcatcctttgtcatccccttcactctaaacaaacccagggcttcagccacagcaaggggccacaccaaactctcatttcaaccccagacttttgcacacgtggttcctctgcctggtgttctcctctttctgctcccaggagactcctattcatccatcaaagaccagctcagaaggtacctcttctggtttagacactgggcaccttaggtgggacttaaatcctaaggtcaacaagacttgtaggtcgggcgcgatggctcatgcctataatcccagcactttgagaggccaagatgggcggatcactggaggtcaggagttcgagatcagcctggccaacatggtgaagcctcatctctaataaaaatacaaaaaattagcctggcatggtggcatgtgcctgtaatcccagctactgggaaggctgaggcacaagaatcgcttgaacccgggaggcagaggctgcagtgagccaaggatccatccaggctccaagcaatcctcccacctcagcctccagagtagctcggactacaggtgcccaccaccatgtctggctaattatttgtatttttagtagagatgggttttcaccatgttaccaaggctggtcttgaattcctggactcaagcgatcctcctgcctgagattgcgccattgcactccagcctgggtgacagagcgagtctccttctcaaaaaaaaaaaaaaaaaaaagagaattgtaaataaatctctacctttccttagtgggtttgttatgagcagtgttatcggtgtagcaattctgaaactgttttgcaagtgttgcaggatagcgcacaaatggacaagcacagctgtattgtttggaaccagggttctccctgggaaagaagggagacacagacgtggaaggaaaaccaggcagagccctgtggtgttgcatggacactggatgaatcagtgtgaagtcacattgttttttttctgtaaagaagtttttcttccttcatttatattaatataggctcatggtttcatattttagccagtggattataatccattactattacatttattttgatgcttaaaatgcccctgattaggccagtggggtctccttcaagctgtctccttatccttttgacatggacccatcattctatgaacacaccctgaccttctggccaataatagaagaatcgcttgaacctgggagatggaagttgcagtgagccgagatcgcaccattgcactctagcctgggtgacacatcaagactccatctcaaaaaaaaaaaaaaaaatagttgagagggaagaagagaagatgacagctgcccgccgcccactctggagtccctgagccaaccaggcaggatggagctggccctggcctcacccagctccattccagggcttctccacgctgccctctactcaaagacccctgccttctggctgcccccgaccccaagggtgacaggatgttataaggcccctctttccggctctgttgcagctgaggtttcaaagcctcagaatgatgcaatggaggggttgggatcggcccccgcctcagttctgaggtgcttctagccatatgaggggaggaggacttccccttatgaagctgaatgggtgtcccctggggcggtgggacagatgccgggtttatttttatgtgttttagaagtatttattctctgccaagtcctttacaaagaggtaagtgaccaatagttggtaggtggcagggctggggttcaaacccaggcaggcctgagggccaaaccatgcctacaactccttcgccgcatggcctcaacccgaaggattcctgcccaaggtggctcgggccagagctgggagcctgggctgcctactgtacagtgagctcaaggagtgcagtgaggtaagcagcaaagctttgttggagggtaaatctgccctgattccgggagaccagagaggaccccacaaatgggacttgactgagaggacccttgaagaatgcagcaccccaaatgaggcagacgctggggcctggaacgaggggccatcggaaactggaggcttgggccaggcgcggtggctcatgcctgtaatcccagcactttgggaggtcaaggcaggcagatcacttgaggccaggagttcgagaccagcctgaccaacatggtgaaaccctgtctctaccaaaaatacaaaattaggctgggcacggtggctcacatctgcaatcccagcactttgggaggccgaggcaggtggatcacctgaggttaggagtttgagaccagcctggccaacatagtgaaaccccgtctctactaaaaataaaaaattagctaggcgtggtggcgagtgcctataatcccagctatttgggaggctgaggcaggagaatcacttgaacccaggagacggaagttgcagtgagccaagatcatgccactgcactccagcctgggcgacaagagtgaaactccatctcaaaaaatgtatatacaaaattagccgggagtggtggcgcacgcctgtaatcccagctacttgggaagctgaggcaggagaattgcttgaacccaggaggcggaggttgcagtgagccgagatcaccccattatactccagcctgggcaacaaaagagaaaccctatctcaaaaaaaaaaaaaaacaaaaaaacaacaaaataaggagttttggaaaccaaggttttattatgcagatgaagcctccaggtagctggcttcagagagaatatagtgtaaatgtttcttatcagactgaaagagtccgttctaacagtaattccaaaagcgaggaggttataacaaggcatgtccagctcccccttcccatcatatcctgaactcattttcaggttaactttggaatgcccttgccgagagaaggagtccatttggatggttaaggggcttaggattttggttttggtttatggaggtccctcaaaagctgctcacaggaggaaaactcatcactggccacaggccacaccaggccagggcagacccagccactgtctcagtgctgaaaccctaaccccctgtgatcagctgagtaacagccccgaagacatccaggtcctgatctcaagaacttggaacgttcccttatatgacaagagggactttgccggtgcgattatgttaagggtcgtgagattggatggaaactgcaatttcaatgcagtttgagttctgtaattagtagactgggctagactactggaccctggaacactccaaacaggctgattggggaactttttatcatcagagattggctgaaacacctgagagaactccctgaaaaaaaatttttttgagacagagttttgcttttgttgcctgaactagagtgcagtggcatgatctcagctcactgcaacctccgcctccctgtgtctacttgaaatacaaaaattggccaggcatggtggcgcacgcctgtagtcccagctacttggaaatagaatcacttgaacctgggaggtggagattgcagtgagcagagatcgtgccactgcactccagcctgggtgacagagggagactctgtctcagaaaaaaaaaaaaaaaagaaagaaagaaagaaaagaaaatgaagaaacaggccaggcatggtggctcacacctgtaatcccagcactttgggaagctggagcaggaggaatgcttgaacccaggagttcaagaccagcctggacaacatagtgagaacccatctctacaaaaataaacaacaacaaaaataggccaggcatggtggctctcacctgtaatcccagctactcaggaggctgaggtgggaggatcgtttcggtcctggatttcaaggtgatagtgagctatgatcacaccattgtactcctgcctctgaggacagagcgagactttgtctggaaaaaaaaaaagaaaatgcaaatgaagaaacatggattcatgaacatctatgaatatttggtttaaaaaggtgaggccatggtgtttgcactgagatcatggcccctcttgcccttcctctcagctcagtgaggctgagactccactctggacagctgcagccaagaacatggggtcccctgctgcctccagaccagggaaacagggctccctctgcccccagctcccagtgggagggcttgcctcccacgaagaacaggacatccatttcctattctacccccagccacctgttgctgagactaagtcctggatgagtgtagccaagagttgggggcccccttcttgcacccagccccactcaaggaacagaggctctgccttgggtgcagtgtgctgcgagtgctggggtcctgatcactccggccctggctcatgtggaagtagctcgacaacaggagaggcaaactttgaggacctcggccattgtccccactcccaccaagtcctcagcccctagcgcagggtgtcactcagagagaagctttccaaagtctccacccccagctccagggccctggctcagagagatttttgtctaatgaagaaacaggccataaaaaagagacttcctaatctcttcccaaagcaactgacctcatttgctacagagaacgaaggaattcaaggcaaaagttgcttttgttttgattttggttaggtttgtttgagagtgcagtgatgcgatctccgctcactgcaacctccgcctcctgggttcaagcgattctcctgcctcggcctcccgagtagctgggattacaggtgcctaccaccacacccagctaattttttttttttaagtagagacggggtttgcaccatgttgaccaggctggtctcgaactcccgacctcaggtgatccgcccacctcagcctcccaaagtgctgggattacaggcgtgagccaccgcacccggcccaaaaggtgcttttgagaatagtagagattatggtgagagataattaggagaagattcaagacacaagctgaactctaggctgctcgtttacaggagagaacagggaatagcaccagtagagggagccctcctgaggtcagaacaaatagcagacattgacctcacacactatttcttccaaggagccaaacttgataggatcagtgtgtagtgcagggcattataggaaattataaagcaatccattggcaacttgcagagcttatttcaaccaagcaaggattagaaaaagaagggctgggtgcagtggctcatgcctaaaatcccaacactttgggaggctgaggtgggtggatcactaggtcaggagttcaagaccagcctggccaagacggtcaaaccccgtctctactaaaaaacaaaaaatacaataattagccgggcgtggtggcaggtgcctgtaatcccaactacttgggaggctgagtcagaggattgcttgaacccgggaggcggaggttgcagtgagccgagattgtgccactgcactccagcctgggcgacagagcgagactccatctcaaaaaaaaaaaaaaaaagagaagaaagaaagaaagaaaaaagaaaagaaaatttgcatagcttaacagctggatatggtcagggaaagaggaagagagccttccaaaaccactgtcatcccagagtaactgcaggcatactcaaagctgggccccctgagaacgaccatagaagctgaacatcgtacggaagaaatagacttcactaaaacaatccagccagtcactaaacaaataaacaagaaaataataacaagcccaggtcaggggagactcatacccagaattgctacaatgtattatttaaatgtcctgtttccaaaaaaaaaaaaaaaaaatatgaagcctgcaaaaaatttaataaacaggaaagcatgacccatagatagggggaaatgcaggcaaaggaaactgcctgtgagagggcacatgttgatttatcagaaaaagactttaaagtagccattatacacacgttcataaaaccaaaggaaactgtgactaaataaataaaggaatgtatgatgatggcgtttcatcaaatagagaataccgataaaaagatagaaattgccaggcacggtggttcacgcctgtaatcccagcactttgggaggccgaggcgggtggatcacgaggtcaggagtttgagaccagcctggccaacatggtgaaaccctgtctctactaaagattaaaaaaaaaaaaaattaactgggtatggtggtgcatacctataatcccagctactcgggaggctgagacaggagaatcccttgaacctgggaggtagaggttgcggtgagctgagattgcaccattgcactccaacctgggtgacagggcaagactccgaattaaaaaaaaaaaaatcgaaaattataaaaaaaaaaaacaaatggaaattatgaagttgaaaagtatagtaactaaaatagccgggtgcagtggctcacccctgtaatcccagcacttttggaggccagagatggtgaaaccccatctctactaaaaatacaaaattagccaggcatggtggcgggcacctgtaatcccagctactcgggaggctgaggcaggagaatcgcttgaacccgggaggcagaggttacagtgagccaagatcacgccactgcactccagcctgggcgacaagagtgaaactctgtctcaaaaaaataaaaaaaaagaaaagaaagaaaagaaaagtatagtaactgaaataaaacattcattaaagggattcaccagctaattttgaaattcatatggaattgcaaatgatctacaacggccaaaaaaatcttgataaagaaaaaaaaaaatggctgagtgtggcggctcgcgcctgtaatcccagcactttggaaagcccaggcaggagaatcactggagcccaagaagtcaagtctgcagtgagcagagatcgcatcactacactccaggctgggccacagagcaagaccttgtctcaaagaataaaaaccagaaacaaccaacaaacaaataacaataattaaataaaaataaaaaacgcaggggtacgttttcatgccttgtatttgtcaatggaacctttgatatgatactcaaaatacaagcaatgaaatgataaattgtattttatcaaaattaaaacttttgctcatcaaaggacactttcaagaaagtgaaaagataacctacagaatggaagaaaatatttgtaaataacaaatctggtgaaagtttcatatccagaatacacaagaactcatagaattcaatactagaacacaaacaacaatttaaaacacaatttaaaaatgggcaaaggatcctaaaagacttttcctcaaataaggtatacaaatggctcacagctcctgaaagatgctcaacctcatttgtcattagggaaatgcaagtcgaacccacaatgacacacccttcacatccctaggatggctattaagccatgcctgctgtcttgatgacccctgcccctgtctgcccccctgtccttgctggtgcctgagctccattggagcggactcattgctggctcccggcactaccaagctgggacctggaatatcttggtgccgctagagtgaaaagactcattaatcacggtcagtcagatccttccagggctaagagaccagccagggtggcctcagcttctccctaactttggatcctaaaaaggaagccctggctgggcgtggtggctcacgcctgtaatcccagcactttgggaggccgaggcaggaggatcacctgaggtcaggagtttgagaccagcctggctaacatgatgaaatcccatttctactaaaaaaaaatacaaaaaattagccaggcatggtggcatgaacctgtaatctcagctacttgggaggctgaggcgggagactcacttgaacccgggaggcggaggttgcggtgagccgagactgtgccactgcactccagcctgggcgacagagcaagactccatctcaaaaaaaaaaaaaaaaaggaagccctgagttctacccagtttggccctttgagggtgagagatcccactattacccaagcctggctgttctgggtatgtaagttgggggacagtgcggatcacagttcaggaaccactcccacagccccaagagcctccctaaccccaccaagtccacctttgacctcttctctgagctccaaatgcctcttgggcgccatcccctggacgtttctcagatgtataacagcccagataaaactcatcattgccgggcgtggtcgctcacccggcacccgtgacaaataaaatgtttttttaaagtatctataggctgggcatggtggctcacgcctgtaatccccgcactttgggaggccaaggtgggcagatcacgaggtcaggagatcgagactatcctggctaacatggtaaaaccccgtctctactaaaaatacaaaaagttagccgggcatgttggcacgcacctgtggtcccagctacttgggaggctgaggcaggagaatcgcttgaacccaggaggcggaggttgcagtgaaccgagatcgtgccactgcactccagcctgggctacgtagcaagactccatctaaaaaaacaaacaaaacaccacattttatttgggccaggcttggtggctcacgcctgtaatcccagcactttgggaggccaaggcgggcggatcacctgaggtcgggagttggagaccagcctcaccaacatggagaaaccccatctctactaaaaatacaaaattagccaggcatggtggcacatgcctgtaatcccagctactcgggaggctgaggcaggagaattgcttgaacccgggaggtggaggttgcggtgagctgagatcatgccattacactccagcctgagcaagaagagtgaaactccgtctcaaaaaataaaaatatatatttgtggttaggcatggtgactcaggcttacacctgtaatcctagaactttgggaggccgaggtaggaggattgcttgaggccaggagttcaagactagcctgggcaacatagcaagatcccatctctacagaaaagtaaatttttaaaaattatgacattttgagctgcatgatgaaaaaaatttaaaaagaaagaaagaagggccgggcgcggtggctcacgcctgtaatcccagcactttgggaggtcgaggtgggcggatcatgaggtcaggagatcaagaccatcctggctaacgcggtgaaaccccatctctactaaaaatacaaaaaattagctgggcatgctggtgggtgcctgcagtcccagctactcaggaggctgaggcaggagaatggcgtgaaccattctccattctcggagcttgcagtgagccgagattgtgccattgtactccagcctgggcgacagagcaagactccgtcacaaaaaaaaaaaaaagaaagaaagaaagaaagaaagaaagaaagaaaattggccacgtgtgttagtgcacacctgtagtcccaactagacaggatgctgaggcgggaggatctcctgagcccaggagttcaaggctgcagtgagctgtgatcgtgccactgctctccagcctaagatacgggaaaaaccaaagcgtttttcttttcttttttttctgctgtcattgtatgaaatagtccataggtttccattatatccagttatagagggtgttactgagttacggattttctgcctgctggatctgtccgtttctgatagagggacattgaagtcgccaactataatagtttctccttgcggtgctgtcgctttttccctcacatattttgatgttctcttgttaggatcatacatgttaaggactgttatgtcttctttgagcattgactccttaatcattatgtaatgccctgtccttatcccggatgactctcttttcttttctttttgtttttcagacaaggtctctgcgaaccaggctggagtgcagggatctcggctcaatgcaacctctgcctcccacgctcaagcgattcccgtgcctcagcctgcagagtagctgggattacaggctgggattaccaccacgccctgctaatttctgcatttttagtaaagacagggtttcatcgtgttggccaggctggtctcgaactcctggcctcaggcgatctgcccgccttggcctcccaaagtgctgggattacacgtgtgagccactgtgcctggcctattcctgatgactctccttgctctgaagtctgtactgtctgaaattaatatagagactcctgctttcttttgatcagtgttggcatagatctttctttatccattcgcttttaatacataagtctttaaagtgtagttcttgtaagcaacatatagttacgtcttgttttttgctcactctgacaatctctgtcttttaattggttcatctggaccactgatatgcaaagggatgttgatataattggattaatagctgcctttttttgtttttactgttttctatttgttgcctttgtttctatttttgtcttccactctttttctgcctcttgtagtgttttgcctttggggtttttcttttttttattttcttttactttctttttttttttttgagacagagtctcccaggctggagtgcagtgacgcgatctcaactcactgtactctctgcctccccggttcaagcaattctcctgttttagcctcccaagtagctgggactacagacacgcactgccacgcccggctaatttttgtatttttattagaaatggggtttcaccatgttggccaggatggtcttgatcttctgacctcgtgatccacctgtctcagcctcccaaagtgctgggattacaggcatgagtcaccacacccagtctatttttttttaagttttttggtttttgtgtttttttttgagatggtatctcgctcttgttgcccaggctggagtgcaatggcaagatctctgctcgctgcaacctccgcctcctgggttcaagtgattctcctgcctcagccttccgaatcgctggaattacgggagcccgacaccacgcccagataattttttgtatttttagtagagatggggtttcaccatgttggccaggctggtgacgaactcctgacctcaggtgatccacccgcctcagccttccaaagaggttagattacacgcatgagccaccacgcccgaccctaaaagtattttttttatagagatggggtctccctctgttgcccaaactggtctcaaacccctgatctcaagttactgcctgcctcagctgcccaggtagcagggattacagacacaagccaccgcccccggctctatttaggaacatcttagttccaagttttggcaattatggataaagccgctataaacgtatgtttccaggcttgtgcggacatacattttcaactcatttgggtagacaccaagagctgcattccagcctgggcaacaagagtgaaattccgtctcaaaaaaaaaaaaaaacacagaaatgtaggccgggcatggtggcttgcacctataatcccagaactttgggaggccaaggcaggcagatcacttgagctcaggagttcaagaccagtctggccaacatggtgaaaccctgtctctactaaaaatacaaaaattagccaggcgcggtggcgcatgcctgtaatcccagctactcaggaggctgaggcatgagaatgacttgaacccaggaggcagaggttgcagtgagcccagatcgtgccactgcactccagcctgggtgatgaagtgaaactctgtcaaaacagaaattattctctcgcagttctggaggctcaaagtcaggaatcaaactgttgaagcctcgaagggggatccttccttgactcctccggcgtctggaggctactggccatcctggtgttactcaaacaccaggggttccatctagggcctgccactcacctcacagaaagccaatcagtgagacaacgattcttgccaaggaagaaggctttaatcaggtgctgcagctgaggggatgggagggcttcatcccaggaatgcagggggtggttcaacataagaaaatccgttaacgtaatgtaccgcattagtagaacaaagggaaaaaaacagtcattccagctgacacagaaaaagcatctaagaaattctaacatttcatcattaaaacatagagaaaactatgaaacgaggggatctgcctcaacattataaaaggtatttgtgaaaaaaccacagttaccatcatacttagtggtgaaagactaaaagctttccccctaagttcaggaacaagacacagaggttcacctttaccactgctactcaatgttttttttttttgttttgttggttttgttgtgttttcgagaaggagtcttgctctgtcgcccaggctggaatgcagtggcgtgatctcggctcactgcagcctctgcccccggggttcaagcaattctcctgcctcagcctccccagtagctgggactacaggtgcgcactgccacgcctggctaatttttgtattcttagtagagacagggtttcaccatgttggccaggatgctcttgagctcctgaccttgttatctgcctgcctcggcctcccaaaatgctggaattacagatgtgagccaccgcgcctggcctagtcaacattttgctagaagttgtagccagagcctttaggtaagaaaaggcaccaaattgagaaataagaaataaaaccatcgctttaaatagggaaaatcccaaagaatacacgcacaataattactagagctaataagcaaatgcagcaaagtttcaggacacaagatcaactcacaaaaaccagttgtgtggtttcctgtttgtttttttgaggagttatgctcttatcgcccaggccggagtgcaatggcgtgatcttggctcactgcagcctctgcctcccgggttcaagcaattctcctgcctcagcctccccagtagctgggattacaggcgcaggccaccacgcccggccagtttttgtatttttagtagagacgaggtttcaccacgttggccaggatggtcttgatctcctgacctggtgatccacccgcctcggcctcccaaagtgctaggatgacaggcgtgagccaccgtgcccggtccagttgtgtttttatgcactggcaaggaacaattcaaaaatgtaattaagaaaaccgctgggcatggtggctcacgcctgtagtcccagcactttgagcggccgaggcgggtggatcccttgatcccaggagttcaagaccatcctgggcaatgtggtgaaaccccctccctacaaaaaatacaaaaaattagcggagcgtgatggcatgtgcctacgatcccagctactcaggaggctgacgtgggaggatcacccgagccctgggggtcaaggctgcagtgagctgtcacatcatgcatcattgcactccagcctgaaaaaggagtgaaattctgcaacatgttacaacgtgaatgaaccttgaaaacgtcattctaagtgaaataagccagatacaaaaggacaatattgcatgtttccacttatagagatacctacaagaatcaaattcatagagacggaaagtagaatagtggttaaaggggtctgggcggagggaggaaagggaagtttgttttacgggtagagtttcagtttgggatgtcgaaaaagttctggagataaataatggtgatggttacatgccaatggctacacgaatgtacttaatgccactgaattgtatatgtgaaaaatggttaaaatggtaaattttgtatctatttaataccatcccccctaaaaaaaaaattgtttttaagagtcaagatctcactctgtctcccaggctggggtgcagtggggtaactgatcagagctcactgcagctttgaactcagccagcttccctgactcaaacgatcatcccgcttcagcctcccgagtagctgggactacagacggtgccatcacgcccagctcattgttgattcccgcccccttggtagagacgggattccgctatattgcctgggctggtgtcgaactcatagaacaaaggatcctccctcctgggcctgggcgtgggctcgcaaaacgctgggattcccggattacaggcgggcgcaccacaccaggagcaaacacttccggttttaaaaattcagtttgtgattggctgtcattcagtattatgctaattaagcatgcccggttttaaacctcttaaaacaatttttaaaattacctttccacctaaaacgttaaaatttgtcaagtgataatattcgacaagctgttattgccaaactattttcctatttgtttcctaatggcatcggaactagcgaaagtttctcgccatcagttaaaagtttgcggcagatgtagacctagcagaggtgtgcgaggaggccattaagactatactttcagggatcatttctatagtgtgttactagagaagtttctctgaacgtgtagagcaccgaaaaccccgaggaagagaggtagcgttttctcctgagcgtgaagccggctttctggcgttgcttggctgcaactgccgtcagccattgatgatcgttcttctctccgtattggggagtgagagggagagaacgcggtctgagtggtttttccttcttgatggctcaatgacagagactagctcgtaaactccgggccgtttccgggctgttcgctcctgcttggcaatgtcgcgagaaaggttttcgcctcctgtttcagcggtgacggcttttgggttttcctcggggtggctttttaattttagtcttggcgcgaggcgggggatgctgtgtggcacctcctattgtctctttttgcgttttctcccattctcgctccctcttttgtcgccgtttcccgcccgccactcccacccccagacggggtctccgggtctcttgttctgtctgccggccccggctggagtgcagtggcgcgatctcggctcctagcaacatctgcctcccgggctcaagcgagtctcccgcctaagccctcccgagtagccggggcttaaaggcgcacacgccactccaggcttttttttttttttttttttttttttttggcagaaacggggtgtcagcatgttagccaggctggtctccaacgcgtgatctcaggtgatccgcccgcctcggcctcccgaagttctgggattacaggcgtgagccactgcacccggcccttctatttttttaaatagcgacggggtttcaccatgttggccaggctgctcctgaacacctgagttcaggtgatccgcccgcctcggcctcccgaagttctgggattacaggagtgagccaccgcgcccgactgagaactgtaagaaataaatttgtgttatttaagccacaaagtctgtgtattttgttatggagcccaagaaaagcagcttcttctgaaactaaacactttcggtatgatcagaactcgtgcctcttggtgtctacccaaatgagttgaaaatgtccacacaaaaacctgcacacctgtttatagcagctttatccataattgccaaaacttggaactaagatgttcctgaatagagccagcggctgtggcttgtgtctgtaatccctgctacttgggcagctgaggcagacagtcagtcacttgagataagcagtttgagaccagtctgggcaacagagtgagaccccatctctataaaaagtacttttagggccgggtgcgggtggcacgcctgtaatcgcagaacttcgggaggccgaggcgggcggatcacctgaactcaggtgttcaggagcagcctggccaacatggtgaaaccccgtcgctatttaaaaaaatagaagggccgggtgcagtggctcacgcctgtaatcccagaacttcgggaggccgaggccggcggatcacctgagatcacgcgttggagaccagcctggctaacatgctgacaccccgtttctgccaaaaaaaaaaaaaaaaaaagcctggagtggcgtgtgcgcctttaagccccggctactcgggagggcttaggcgggagactcgcttgagcccgggaggcagatgttgctaggagccgagatcgcgccactgcactccagccggggcggcagacagaacaagagacccggagaccccgtctgggggtgggagtggcgggcgggaaacggcgacaaaagagggagcgagaatgggagaaaacgcaaaaagagacaataggaggtgccacacagcatcccccgcctcgcgccaagactaaaattaaaaagccaccccgagaaaacccaagagccgtcaccgctgaaacaggaggcgaaaacctttctcgctacactgccaagcaggagcgaacagcccagaaacgccccggagtttacgagctagtctctgtcattgagccatcaagaaggaaaaaccactcagaccgcgttctctccctctcactccccaatacggagagaagaacgatcatcaatggctgacggcagttgcagccaagcaacgccagaaagccggcttcacgctcaggagaaaacgctacctctcttcctcggggttttcggtgctctacacgttcagagaaacttctctagtaacacactatagaaatgatccctgaaagtatagtcttaatggcctcctcgcacacctctgctaggtctacatctgccgcaaacttttaactgatggcgagaaactttcgctagttccgatgccattaggaaacaaataggaaaatagtttggcaataacagcttgtcgaatattatcacttgacaaattttaacgttttaggtggaaaggtaattttaaaaattgttttaagaggtttaaaaccgggcatgcttaattagcataatactgaatgacagccaatcacaaactgaatttttaaaaccggaagtgtttgctcctggtgtggtgcgcccgcctgtaatccgggaatcccagcgttttgcgagcccacgcccaggcccaggagggaggatcctttgttctatgagttcgacaccagcccaggcaatatagcggaatcccgtctctaccaagggggggggggcgggggggcgggaatcaacaatgagttgggcgtgatggcaccgtctgtagtcccagctactcgggaggctgaagcgggatgatcgtttgagtcagggaagctggctgagttcaaagctgcagtgagctctgatcagttaccccactgcaccccagcctgggagacagagtgagatcttgactcttaaaaacaattttttttttaggggggatggtattaaatagatacaaaatttaccattttaaccatttttcacatatacaattcagtggcattaagtacattcgtgtagccattggcatgtaaccatcaccattatttatctccagaactttttcgacatcccaaactgaaactctacccgtaaaacaaacttccctttcctccctccgcccagacccctttaaccactattctactttccgtctctatgaatttgattcttgtaggtatctctataagtggaaacatgcaatattgtccttttgtatctggcttatttcacttagaatgacgttttcaaggttcattcacgttgtaacatgttgcagaatttcactcctttttcaggctggagtgcaatgatgcatgatgtgacagctcactgcagccttgacccccagggctcgggtgatcctcccacgtcagcctcctgagtagctgggatcgtaggcacatgccatcacgctccgctaattttttgtattttttgtagggagggggtttcaccacattgcccaggatggtcttgaactcctgggatcaagggatccacccgcctcggccgctcaaagtgctgggactacaggcgtgagccaccacgcccagcggttttcttaattacatttttgaattgttccttgccagtgcataaaaacacaactggaccgggcacggtggctcacgcctgtcatcctagcactttgggaggccgaggcgggtggatcaccaggtcaggagatcaagaccatcctggccaacgtggtgaaacctcgtctctactaaaaatacaaaaactggccgggcgtggtggcctgcgcctgtaatcccagctactggggaggctgaggcaggagaattgcttgaacccgggaggcagaggctgcagtgagccaagatcacgccattgcactccggcctgggcgataagagcataactcctcaaaaaaacaaacaggaaaccacacaactggtttttgtgagttgatcttgtgtcctgaaactttgctgcatttgcttattagctctagtaattattgtgcgtgtattctttgggattttccctatttaaagcgatggttttatttcttatttctcaatttggtgccttttcttacctaaaggctctggctacaacttctagcaaaatgttgactaggccaggcgcggtggctcacatctgtaattccagcattttgggaggccgaggcaggcagataacaaggtcaggagctcaagagcatcctggccaacatggtgaaaccctgtctctactaagaatacaaaaattagccaggcgtggcagtgcgcacctgtagtcccagctactggggaggctgaggcaggagaattgcttgaaccccgggggcagaggctgcagtgagccgagatcacgccactgcattccagcctgggcgacagagcaagactccttctcgaaaacacaacaaaaccaacaaaacaaaaaaaaaaaacattgagtagcagtggtaaaggtgaacctctgtgtcttgttcctgaacttagggggaaagcttttagtctttcaccactaagtatgatggtaactgtggttttttcacaaataccttttataatgttgaggcagatcccctcgtttcatagttttctctatgttttaatgatgaaatgttagaatttcttagatgctttttctgtgtcagctggaatgactgtttttttccctttgttctactaatgcggtacattacgttaacggattttcttatgttgaaccaccccctgcattcctgggatgaagccctcccatcccctcagctgcagcacctgattaaagccttcttccttggcaagaatcgttgtctcactgattggctttctgtgaggtgagtggcaggccctagatggaacccctggtgtttgagtaacaccaggatggccagtagcctccagacgccggaggagtcaaggaaggatcccccttcgaggcttcaacagtttgattcctgactttgagcctccagaactgcgagagaataatttctgttttgacagagtttcacttcatcacccaggctggagtgcagtggcacgatctgggctcactgcaacctctgcctcctgggttcaagtcattctcatgcctcagcctcctgagtagctgggattacaggcatgcgccaccgcgcctggctaatttttgtatttttagtagagacagggtttcaccatgttggccagactggtcttgaactcctgagctcaagtgatctgcctgccttggcctcccaaagttctgggattataggtgcaagccgccatgcccggcctacatttctgttttgtttttttttttttttttttttttttgagacggagtttcgctcttgttgcccaggctggaatgcagctcttggtgtctacccaaatgatttgaaaacgtatgtccgcacaagcctgcacacatatgtttatagcagctttacccataattgccaaaacttggaactaagatgttcctaaatagagccgggggcggtggcttgtgactgtaatccctgctacttgggcagctgaggcagacagtcacttgagatcaggggtttaggagctgcctgggcaacagagggagacccctgtctctaataaaataaaataaaataaaataaaataaaataaaaaatatgtcttcactttgagaggccaaggcaggtggatctcctgagatcaggagctcaagaccagcctggccaacatggcaaaaccccatctctactaaaaatacaaaaattacactgggcgcagtggctcccgcctgcaatcccagcactttgggaggctgaggcgggcagatcacgaggtcaggagatcgagatcatcccggctaacatggtgaaacgccgtctctactaaaaaaaaaaaaaaaaaaaaaaaaatacaaaaaataagccgtgcgtggtggcgggtgcctgtagtcccagctactcaggaggctgaggcaggagaatggtgtgaacccgggaggcagagcttgcagtgagccgagatcgcgccactgcactccagcctgggcgacagagcgaaactccatctcaaaaaaaaaaaaaaagaaagaaaacaacaacaacaacaacaacaaaaattagctgggtgtggtggcacacgcctgtaatcacagctactcaggaggctgaggtaggagaatcgcttgaacctgggaggcagaggttgcagtgagctgaggtcaccctactgcactgcagcctgggagacagagtgagactccacctcaaaaaaaaaaaaaaaaaagtcctacataggtgaatggataaataaactgtggtacatccagagaattagatattattcagtgctaaaaacaaatgagctatcaagccatgaaaaaacattcaagaaccttaaacgcatattactaagaaaaagaagccaatgtgaaaaggccatatactgtacgattccatacacatgaccttctggaaaagcaaaactatggagacagtaaaaggctcagtggttagcaggggttgggggagggagggatggacaggcagagcacaggggactttcagggccacaaaactactctgtatgacatgacaatggtggatacggcattacacatttgtccaaacccacagaatgtacaacaccaggaatgagctgtaatgtgagctatggaccttatttaataattccatatgcatattggtacatcagttgtaacagaagtatcacgctataatgcaaaatgttactaacggggaaatgagtgtaggggtctgagagagaggatgtatggggattctgttctttgtgctcaattcttctgtaaacctataaccgctcctcccagaaaagtctactaattaattctttttttttttttttttaaagacggagtcttgctctgtgtcccagctggagtgcagtggtgcgatcttgtctcactgaatcaagagattctcctgcctcagcctcccaagtagctgggattacagacatgcatcaccatgcctggctaatttttgtatttttagtagagatggggtttcaccgtgttggccaggttagtcttgaactcctgatttcaggtgatctgtccacctcggcctcccaaagtgctgggattacaggcatgagccactgtgcctgccctctactaattaattttttaaaacacttaaaacacacaggcatacgtacataatgacaagtcactggctgttcacacacaaacagaatagcatgggttatgatcccagtcttaaaaaatcttacctgtcagctggacgtggtggttcacgcctataatcccagcactttgggaggccaagttaggaggatctcttgtgctcagtagttcaagaccagcttgggcaacagggtgaaaccccgtctctacaaaaaatacaaaacaattagccaggcatggtggcacgcatctgtagtcccagctacttgggaggctgaggcgggaaaatggcttgagcccaggaggtggaggttgcagtgagccaagatcataccactgccccccagcctggataacaaagccagaccctgtctcaagaaaacaaaaaacttgcctgtccatccattcattcatcttatatagatagattgaggctgtgtggagagaattctatgatgatgttcatgaaatataaaaccccacagatgggggagatttattgctttttttctgtatactttctaagtggcttggattttttctgttgagcatgtttataaaacaagtacttaaaatttttttttaatttaatgaagtagtgtgacatttcttgcacctttgagtttgtgagcaaatattcataaatttatatttggatgtatgagtttgttgtgagaaaaagaccacaaattcacgtatgaaaacccaaaaacccaatgtggttattgatgaggggtaggataatagattgtttgtttgtttgtttgtttgtttatcttttcagagataagagtcttgctctgtcatccaggctggagtgcagtggcatgatcactgctcactgcagcctcaaactcctgggctcaagtcaacctcccacctcagcctcccaagtagctgagaccagaggtgctcgccaccatacctgacttatttatttatttacttatttatttattgtagagacaggatttcattgtgttgcccaggctggtcttgatctcctggcttcaagtaatcccttccacttcagcatcccgaagtgctggaattacaggtgtgagccaccatgtctggcccctggatttttttttaagtgcattttatcatattctttttcctcttccccctcctcttccactccccctcctccttttccttctatttcattttctaatcatgtcattcccttgctcactgctttcagtaccagacactagggaaataaaaattccttaaattgtatgacttattaaaaggtcccagcccctgtgggaggtccacagttccccaagcaaacgggaaaaacaggttcacaaactaggtaccttatattcacattatttaaagcttacagtaacccattttactggtggcaggattaagagccttaacctaggaatggaggagcccaggttcgaacccacatgtggggcgctgggagtgtggttcctcccagggctgccgggtttcttagccgcatctcaaggcagcccccagcgggccgcgccccatcctatggccgcctctgccctcttgcggcggcttctggaactacaggtcgccttccggtcccggaagtgaatgaggggtcccccgggggctgtgctaaggacggcctgtggcagggccactccacacccctcagcgtccgggccacacagacacagaacgcaagagagagactgacccacccacgcaccggtccccatagacgcagagaccgaggcagaaatgacgggattgccgcagaccggccaggagcagggacagacagcggctccgcagactctggtgggactgggctgaggccactctcgtgttctcaccacaccctctctcaactataactacctaataaaacttaaaattgttctataaagagatgggggggggggcgtgtttgtttgtttgtttgttgagatagggtcttgctctgtccccaggctggagtgcagtgccgcaatctcggctcattgcaacctccccctcctgggctcaagcaatcctcccacctcagcctcccaagtagctgggactacaggcttgtgccaccactcccagctaattgatgtattttttgcagagacgaggtcttgctatgttgcggaggctggtcttaaacttttgggctcaagccatcctcctgcctcagcctcccaaaattcctgggattacaggcgtgagccaccacacctggtcaatacatgtactcaaagggggactttatctattgctactcttaaatggaaaatttgtgtcactttcataggcaataacaatgaaagtgaataggataaaaacaaaacaatgttattaaatggtgttggatgcttccccacagaggctgtgtaggatgagtgctctgttcaaaaacgagttttagcaaagtgtgaggacagttttgcaaacatgtttcatattccaactcagtagacacaatttttcacaaagtaacattcttccttttctgatattttctatcgtatgttattccatctatttcgttttattttttaaagcactcaaaggtgggtagaggcaagaagtataaaaacaggtgggggtcgaggctgagtggcggtagtgagggctcataccttccacttttgtgcatgttcagatttaatttgcaaattaaaaagaagtcgtgtattttgttttttgtttttttttttttttttttttgagacggagtttcgctctgtcgctcaggctggagtgcagtggcgcgatcttgggtcactgcaagctccgcctcccgggttcacgccattctcctgcctcagcctcccgaatagctgggactacaggcgcccacgaccacgccccactaattttttgtgtttttagtagcgacggggtttcaccgtgttagccaggatggtcttgatctcctgacctcgtgatccgcccgcctcggcctcccaaagtgctgggattacaggcgtgagccaccgcacccggccttaaaaagaagttttaaaaaaactaatttggattcagtatactaactttatagctcactaagcagtcacaccccataattggaaaaactgtgtgcaaaatacgtaaagccctaacactgtgcagagattttacctgggcataatcagcagactgaaagtgaatgaagaaggaaattgccttcccactgtagttgattgtctactgaggcggccaccaagaacttctccctgccctgtgccctccgccacccccacatccaaaggtgaagcctatttcccctccccttgcatctggcctggccttgtggctgttttcacccctagaatgcacccccactagaatgcaccagaagcgatgttctgggacttccaagttaagacctcaagaggactagcagcttctgattgttatcatttgggatgctccttctggaaatgagccaccacgttgtgaggaagcccaagaagcaacacagaaagacccatgcggagaactgaggccctgggctaacagctccagctaagcttctagctggcagccagcagcaactgccagccacatacttcctatccatgcctatggcatcacatcacgaaaacacaggatgaccgggcgcagtggctcacgcctgtaatcccagcactttgggaggccgaggtgggcggatcacgaggtcaggagatcgagaccatcctggctaacacggtgaaaccccatctctactaaaaatacaaaaaattagccgggcgtggtggcgggcgcctgtagtcccagctactcgggaggctgaagcagaaaaatggtgtgaacccgggaggtagagctttcagtgaactgagatcgcgccactgcactccagcctgggcgacacagcgagactctgtctcaaaacaaacaaagaaacaaaaacaggattcccagttaaaattgagttttgaaaaaatagtgaaaaattattatcactattatttttatttttatttttttgagacggagtctggctctgtcaccctggctggagtgcagtggcacgatcttggctcactgctacctccgcctcccgggctcaagcaagtctcctgcctgagcctcccaagtagctgggactacaggcaagcgccaccactcctggctaatttttatacttttagtagagacggggtttcaccatattggccaggctggtctcgaacccctgaccttgtgatctgcccatctcagcctcccaaagtgctaggataacaggcgtgagccactgtgcctggcctgacaaattatttagtgtaagtatgccccaaataacgtgggacattctcataccaaaaaaaaaaaaaaaaaaaaattcattcattgttttctaatttaactgggagtcctgtatttttatttgatatattcaacaaccctgcggactttctctggcttcaagagaatgctcagcccgggcgaagggcaaaagaacagtgaggacaagtgccaccctctccagcccttgttgggacacttccgagctgtgctcgcccaagagcactgagcctctgctgcctgcagcagtgacctgctccttcttggctttcaccccttgatctcacttctccacatgcctgctggtgcctcctagggttacctcccaaagaaactcccagtaccgaaattcttgtctcagggtcttttttttgagacggagtctcgtcctgtcgcccaggctggagtgtagtggtgcaatcttgactcactgcaacctccaccccctgggttcaagcaattctcctgcctcagcctcccgagtagttgggactacaggcgtgtgccaccacgcctggctaattttttgtattttttagtagaaataggttttcactatgttggccaggacggtctggatctcctgacctcatgatccatccgcttcggccttccaaagtactgggattacaggcgtgagccaccgcgcccggcctatttgagaactcaaaccaagacaggaagagccgggtaaacgctaagtttaatgatggccgttattccagttattcactcgcattgcctcttactgtagaggaaaataaacaggaatgtaataatcacagctaacattaattaagcccctactggatatgatacatgtttcagatgtactaactcacttcttaccaacaaccgtctgaaatatctttaagtccattttccacacagggaaaccaaggcatagagagcctaagcaacttaacatctcattgccagcaagcaacagcagcagaattcacacctagaaagtggggcttaataaaatgtaaaattgttctataaatagataaagtgttattaaaaagaaaaatagaatgaattttgaaacgtcaattaatgtacttatttatttatttatttatttgagatggagtcttgcttagtcgcccaggctggagtgcagcggtgcaatctcggctcactgcaagctccgcctcccaggttcacgccattctcctgcctcagcctcccgagtagctgggactacaggcgcccgccaccatgcccagctaatttttttgtatttttagtagagatgggatttcactgtgttagccaggatggtctcgatctcctgaccttgtgatccgcccgccttggcctcccaaagtgctgggattacaggcgtgagccaccgcacctggcctattcattttatttttaagacagggtgtcactctgctacccaggctggagtgcagtggtacaatcatggctcacttcaacctcgaactcctgggctcaagtgatcctctcacctcagcctcctgagtagcaggtggacaccactcagggcccatgtgttcacatattaggccacagtgcctctccaacccccagaatgaaatccaagccccttggcctggtcctcaagtctttctctgacctggtcatccctgccacctgccctctcttctccagctaccttgaatcacttgaagaatctccatgcctcacagctttcattgctgttacttctgccttgaacacccttcctccttgtcattcccacttttcaagtctcacatcagcatgcactgcctcctccaggaagcctctcagcactcaccccagagtccgtcaggctcctccaggttcctatggcctcccagctgtcccctatttgatcacaagtgctggctctggaagagttgatagaggagcaggcggctgagtgagaggcaccatgaggagtgggcggctgagtgagaggcaccgtcctgccccatggttagcgcaaaaatcgataaaccagcacccaatgggcacctactgtgtgcaaggcactgttctcagtgctggggctacccatggaagtagacagacaaaaatccccgcacttacaggccgactttctcctgggcaggcagacgataaacacagtaagtaggatggagagctgggaggtggcccaaggagagcacatgagggaggatgctgggcgttcgtgccatttgcatggctatgacagcgtgctgcgggggcatcgatgttcccacctccccatgaggcctcccctcgcatcctccgatacacactggcccctccagctccacttcccttttttttttttttttttttttttttgagagaagtcttgctctgtcgcccaggctggagtgcagtggcccgatctcgactcactgcaacctctgcctctcaggttcaagcgattctcctgcctcagccttccaagtagctgggactacaggcgcccaccaccatgcccggctaatttctgtatttttagtagagacagggtttcaccgtgttggcctggctggtctccaactcctgacctcaggtgatctgcccgcctcagcctcccaaagtgctgggatgacagacgtgagccaccacgcccggcttttttttttttttagactgagttttgctcttgttgcccaggctggagtgcaatggtgtgatctcagctcactgcaacctctgcctcccaggtgcaagtgactctcctgcctcagcctcccgagtagctgggattgcagacatgccccaccatacctgactcattttttatttttggtagagacggggtttctcagtgttggtcaggctggtctcaaactcctgacctcaggtgatccgcccgcctcgacctcccaaagtgctgggattacaggcgtgagccaccgcgcccggtccggcttcacttctttaagcactcaccctgtgctagatagacaactgacattccgcgttgtgtttattgtttattgcccgtcccctctatgtcagcttcctgaggcagtgactttgctcatcgttgtccctgcggtatcgccggtgcccaactcagtatctagcacacggtaagtactcagggaagagttgtggaggatacattttgcggaaggggaaactgaatctcaaggaaggaagatgatttgctcgaggccacatgaaaattagaaggcaggagagggatttgagcagggtctgtggctccgagaccgaggctcctctccgggtgactcttcccgggattctggcctcatttggacctccagggccccggacctgagcctggggcagagctgggacccaggcgggcgaggctgagcggctagctgagagtcgccagcagagggcgctgtctacacgtgtccgggcgcaaggaggcaccagtagggctgagcctggggaggcagagagagcggcgggttgtggggtggtggggcagtggggcggtggggcggtggggcggtggggcgacaggatggggaggagactgaggcagcgggtgctgtgggaacctacaggagaactttaccagctggataaaggcaggtttcccaggagtttattttttaactgtatgctgaaaaataaatgggaggtggcgtttgagaaagcgaagtgtgttccaggtggagagaacagcatgtgtgaaggcccagagccggcccccggatcttttcagaatgcatcttggtcaggggaggatggtcggccaggacacatgcatggccccctggagtcgtgcagcgctggccttggtgagtcttcaggcacagattgaggcgtaaaggaggtgctcctgccgaaatttaattatgcccaggcatggtatcccagcattttgggaggccaaggtgagaggattgcttgaggccaggaagttcgagaccagcctgggcaacatagtgagatgcgatctctacaaaaatttaaaaaattagccaggtgtggtggcatacacttgtagtcccagctactctggaggctaaggtggaaggatcacttgagcacaagaagtggaggctgcagtgagctgaaggggccactgcactccagcctgggtgacagaacaagaccctgtctaaaaaacaaacaaagaagtaaatgccctagtctcaggtattctgttagagcaacaccaaacacactaagacagggaggaaggggctgggtgggctcccacagtcctgtccagccactgggcccgtgcagcacagcacttcccgggtgcatcagcattgagcctttcctgagtgctgctgccatctgtcctccagttatgaagggaacaagagacccagaaggggtggggctggcccatggtctcccttgctcacagccctgggctggagcccttgtacagagctgcctcctggtcagccaagaaaggctcactggaggaggaggggtaggtcaggcctcttcctggcctcagaacaggatatgggtgggggatgttggtgtctcctacactggggcctgcccaccttcttcccccaatgttcctccatcctgctctgagcgttgtgcagaggaccctggactgtggggttcatcctttcctagggagcttccaagggcccacacagcctgctccccgcaccccatggaggcgcaatgatagcagaattactggcactgttaacctgctggagtgggaacctggagtcctggaaggtcagaggtcaagctggggggctgggggcactgcctgcactggccactgcagtgcagagaagctgaggtgacctcaatctgagagactggagaccagggttgggtgagggtgcatgggaaacgggtggatggggactgggtgaatgggtactgagtggatggggactgggtggatggggagtgggtggatggatagtgggtggatggggactgagtggatggggactgggtagatggatactgggtggatggggactgagtggatgggtactgggtggatggggactgggtgggtggggattggtggatggggattggtggatggggactgggtggatggggactgggtggatggggattggtggatggggactgggtggatggggactgggtggatggggattggtggatggggactgggtggatggggactgggtagatggggactgggtgggtggggactgggtggatggggattggtagatggggactgggtggatggggatttgtggatggggactgggtggatggggattggtggatggggactgggtggatgggaactgggtagatggatactgggtggattgggactggtggatggggactgactggatggaaggagggcagggggccaggtggggccaggcagcctgcctgctctgctgagcagcctggacccaggggctgcctctcccaggcctcagtctcatcatctatagaatggagtttccagagatggtctgaggccccttccaactacctgcaatgtgctgggtcccaggtccacaggaaggactggttcctagggtcttccttcccagcaaattgtccctcctgcttctggcagcaaaagcttcccaggataatattatcaatagtaatattgtcccccctcctcctctgcctcttcttgtgtttctatattccaggaactttcctaaatgattcatttatttatcaaataatttaatcccccacaatcccatgagtaagagacatttactgatccctttttatagttgaggaaacagactcagggaggggaggtgacttgccagagccacacagctggcaatctggctcctgtacttccgcatccctgaggtcactttggtgcccccgccgcatgccagggataaagagacccaagaccttaccgcaactcacggagacctatgtggctgcatgtgtcacccccaggcagagtgacttgaagggcccagggaggggcctcttttcatcctggggactgccaagccctggagtccagctgggcacgggcagtcagcctgggctgggggatggtgcctggctgctaggatgctggtcctagcatggcaggcatgggttaaaatcccagctgtgccactttctggtgtgtgattccaggcacgtgacctttctgctttgtgcctcagtttccccttctgtggaacggggataatagcaacacctcttttataaggcaaggtggttgtgaggattcaatgaagcaatacacgaaagcagttgcctgcttggtcccgtgggttctccatgggatagggaacccacggaagccacgcccagctaatttttttgtattttttttagtagagacagggtttcaccatgttggccaggctggtttcaaactcctgaccttgagtgatccacccacttcagcctcccaaagtgctaggattacaggcctgagccacggctcctggctgtttgttttttgagacagggtctcactctgtcgcccaggcttgagggcagtggtgctgtcatagctcattgcagccttgatctcctgggctcaagtgatcctcccacttcagcctcctgagtagctgggactacacgtccacactaccatgcctggctagttttttattttgtagaggggggatttcaccatgttaccatggtcttgaactcctaagctcaagtgatccacccacctcggcctcccaaagtgccggaattataggcatgacccaccatgcccagcctgaatggccacttttgatggagcacttactatgtgtcgccaaacccctctgagcctcagtttcctcctttgtaggtgggacttgctcagggactcactgctggccttggggagcagagaactcaggtctttgtgattccgaagtccaggttcttccacctgcaactgcagtttccagaattggtcccaccccaggaggatcagccaggtgatatgagatcctgctcggggctgtgaaaagggaatgggaagtcagggcaccctgcctggtcccacactgatccacctggggtacccatctgagaaataggggtggagaccagactggatgatgcaaatggcatgtggcattgatcattggcccctcacgctggccacggcctctaggtgggcagagtgcactccctgtctcttgactctgggctcagccatgtaacttgctttggtcaatgggatagcagtggctataacaagaccaaaggcttgaggtgcacttccacagtggagctgtcttcttggcttctgctgtgagaagattgtccccctgaatggctgccggcccttcagcctcgccccgccaagagacacatggaacagccagagcccagcctagagcctgtatcccagcctagcctgaggcagagccacccagccaagaccaactgaccttcagctaacctgcagatgcatcagggggaattaaatgattgttctaaaccactgagttttggggtggtttgttatgtggcattattgcagtgatagctaatacaagcctggtgtcagtctacaactcttggactctgagctgcatttacgtcctgaatccatcacttactgagaatcaggtctttattattattattaattttactccatcaatttcaagttttccataagagacatagacaatgtaaaggtcaaagattttgggcgacaaaacagagataactacaaaacctctggcaaacaacagttgctacctttgcaccaagctgagctctgagcttcctgacaggcatggcaaagagaggaagaacatgcactactcatatgctggggagcattaaggtcctacgggctgcgtcccatgggctggcgacctcccactggggccctcttcacattgctgtgggatcccagcattttccccaactttcctccttccagaccctgctccagtatcaccccaacttgaagccttcctggctgttagaatttcttacagcagattgcctctgtcactcattagttcatcccgtatctgctggcatcaacctatgttgtgcttagaaaagacttatagaggccgggcgtggtggctcacgcctgtaatcccagcactttgggaggccgaggtgggtggatcatgaagtcaagagattgagaccatcctggccaacatggtgaaaccctgtctctactaaaaaaatgcaaaaaaattagctgggcgtggtggcgggcgcctgtagtcccagctacttgggaggctgaggcaggagaatcacttgaacccgggaggcggagcttgcagtgagctgagattctgccactgcactccagcctggcgacagagcgagactctgtctcagaaaaaaaaaaaaaaaaagaaagaaagaaagaaaagaaaagatgtattgaggctgggcgcagtggctgaagcctgtaatccaccaaggtgggcggattgcctgagctgaggagtttgagaccagtttgggcaacatggtgaaactcccgtctctactaaaatacaaaagaaattagccaggcatggtggcatccgcctgcagtcccagctactcgggaggctgaggcaggagaatggctcgaacccaggaggtggaggttgcaatgagccgagattgcgccactgcattccagcctgggcgacagagcatgactccatctctaaaaaaaaaagaaaagaaaagaaaggacttggctgggcacggtggctcacgcctgtaatcccagcacgtcgggaagccaaggtgggtggatcacgaggtcaggagatcgagcccatcctggctaacacagtgaaaccccgtctgtattaaaaatacaaaaaaattagccaggtgtggtgacgggtgcctgtagtcccagctgctcgggaggctgaggcaggagaatggcgtgaccccaggaggtggagcttgcagtgagccgagattgcaccactgcactccagcctgggcgacagggcgagactctgtctcaaaaaaaaaaaaaaaagaaaagaaaagaaaagaaaagaaaagacttatcgagtgaataatgaataaatgaatgaatgaggaaatgaatttacagatggggaagtgaattaatgaagttaaaagcaagtacatggaagaaagtgtttgtttacctgagtctgattaggggaaggagccctgagtggaggcactgtcgtttgaggtggtcttgcctatacctttgtaaagaatgcttgagaagtttcttgaggggttctgggagctgaggatcacataagaattctagccgagaacaatttgtcagctgtcacagtgcagagcatgatggttgaactcaaatgccgccaagcagatgacagggacagtttccacctagttcaggaacataagctaaggcacttcagggaggtttttttgtttgtttgtttttaatttttttgagacagggcctcactccgtcacccaggctgactgcagttgtgcggtcttgattcactgcagcctggaactcttgggctcaagggattctcccacctcagcctcctcagtagctgggatcacaggcttgcaccactatgccggctaattttttaatttttttccagagagggggtcttgctttgttgcccaggctgctctcaaactcctggcctcaagtggtccttccacctcggcctcctaaagtgctcagattacaggcgtgagccaccgtgcccagctggggagtatttttatgtccccaaaatgcaggatctgcctccagttgatttatctttagtgaataaggatgaaaatgctatctatttcctggaaaatcctcttggccttcaaccaaaaatggttaaaacagatcttgaagaagagctagttgagtggggcaaaatgggagcctatggtcacgaagaaggcagcatccttgggatacagagatgagagtattgtaggcctacagaaggactataggagcctacgagaaagaaatagccctagtgaatgcgctgactgttaatctacatcttctactgttacccagggtctcactctgttgtccaggctggagtgcagtggcacaatcacagctcactgcagcctcaacttcccgggctcaggtgatcctcccatcttaacctcccaggtagctgggactacaggcacacaccaccacgccagactaatttttgtatttttttgtagagatggggtcttgccatgttgcacaggctggtctcgaactccttggattacaggtgtgagccaccgcgcccagccttagtccagttattgtttaagcctataccaaatggtataaaattcttatagaagccaaagctttctcttttaatcattatactgttgagtcacagctacgactccatggagttaacattgaggaaaggggattataaagccaagacgggggaggaaaccttaagaataaaggatattggccgggcgcggtggctcatgcctgtaatcccagcactttgagaggccgaggccggtggatcaccagaggtcaggagtttgagaccagcctggccaacacggtgaaaccccgtctctactaaaagtacaaaaattagctgggcgtgggcgtcgtggcaggcgcctgtaatcccagctactctggaggctgaggcaagagaatcgcttgaacccgggaggtggaggttgcagtgagctgagatcgtgccattgcactccagcctgggggacaagagagagatttcgtctcaaaaaaaaaaaaaaaagaaaaattagctgggtgtggtgatgcatgcctgtaatcccagctacccaggaggctgagacaggagaatcacttgaacccaggaggtggaggttgcagtgagtcaagatagcgtcactgcactccagcctgggtgacacagcaggactccatctgagaaaaataaataaataaataaaataaaataaaggatatccctgaagcaattgagaagggaggaggctcaattacagcaatcctgttcagtgggctgcatttttatactaggcagctctttaatatacctgctaccacgaaagctggacaagtgaagggatgttttgctggcttgatctagcatgtacagttggaaatgctgaactcacttacgtgacagaagagttgactttgcccactggtgttcccacaataatttgaatgcaggagcaggaggtctggcaggtactttttccatgaaaagcatgcccgtatgattaaagctgtgctgctggggtggtttggctgtgaactcagcaccagatttgagatggataaccaactgcagttaatccctggggttagtggattccaaatttcaaatcctcccattttgttggtctgtttcttacagtttagagatctttaggcaggcagcgattaaagcattgtggagaaaatctattttgctgactggttatctggaatacctgatctagcactgctatggcaaaaataaagcagaatctaagaagccaatggtgacctggaggtgaccattactccatcccatatggaggatcagggctgccagctgacactaacatttttctgttccaaagaaagatgttttccaagaggtagaaaaaagaggagtggtttatgacaagtggaatccaaatgtcattcaagtggctccagttcctttctatcattctttccatgatgtttataaatttatcaatctgggctgggtgtggtggctcacacctgtaatctcaccactttgggaggccgaagccagaggatcacttgagcctaggagtttgagaacagcatggacaacatagtgagaccctgtttctacaaaaaaacaaacaaaaaaaagtatttttaattagccaggcatggtggcacacacctatagtccctgctacccagaaggctgaggcaggaggatcacttgatcccaggagatcaaggctgcagtgagctgtgatggcaccactgcactccagcctgggcaagagagtgagaccctgtctccaaaaaaaaaaaaaaaaaatttatcagtctgctcacttctgtacttcactctgcagaaacaaaaattagcagtgttttctagaacaatttaagcaaattatactgaaagctgatgtgtgtttttttttttaccattattcaatttttagttattgaaagtattttacaattgattgcatgtagctggcagtaagtaatatactttacagaaaagaaaaataagtaaatgaaacaacaagtaagactaaggagtgatgggggggctaaggaaattgcttttattttatacaagtttattgaaaaccacctgtacttatccctgagagaggatgcagatatggcccctgcttattagaagcacaggtctgagggggggaggcagatccagatccagacccagccaatcatggctgaaggtgatcagtgctgtgacaaaggagtcccagggactgaagggcccaagaaagccccagtccatcctggaggtcagggaaagctccctggggatggaaagaaatgggttgtataggaatttgccaggagaagaggtgggagaagatggagcaacatgagcaaagggtgaggaatgagaagaactaagcaaatgtgcaggagaaataaatggagcttctagaaatttaacacctagtaacatattaaaaactcaatggagagtttaaacgacagtttagacaaagctgaatagagaattcatgatctggaagatggatttgaagaaattatccagaattcaacccagaaagaaaaataaatggaaaatgggggcaggggggaaagaagaattcaacctgagaaagctgaaggaggaggaggaggaggaggaggaggaggaggtggcagcagtagcaaggagaaggagaagaagaaggaggaggagaaggagaaggatgaggaggagggagaggagaagaagaagaagacgaagaagaagaggaggaggaggaagaggaggaggagaaaacaaagaaaaaaagtggttaggagccagggagaatacaacaggaagagctaacataggtagcagttccagacagagaagggaaaacgagacaaattcaatatttgaaaacatgaagtctgactttttttccatatctaataagcaccaccaaatgcatagattctagagatccaatgaatcccaagcaagataggtaggaagaaattcatgtctggacatattgtagtgaaaatatagaacaccaaagtcaaagaggagatcctagaagcaaccagagagaaagcagaggagattctttaagtgtttcagtgttgcaacagtgagatattcaaaggcagggagtatagggaaatggggctctagtagagccaattattaagggtgattttgagccagaggagtgatacgatgagatctgtgtttcagaatctgagtatggaaagccaggtgcgctgctcaaacctgtaatctcagcactttggggggccaaggtgtgtggatcgcttgagaccaggagtttgagaccagcctgggcaacagagtaagagacgctgtttctttttcttttcttttctttttttttttttttgagacagagtttcactctgtcacccaggctggagtgcagtggcgtgatctcggctcgctgcaacctccgcctcccgggttcaaacgattctcctgtctcagcctcccaagtagctgggactacaggtgcccacaaccagacctggctaatttttgtagttttagtagagacagggtttcatattggccaggctggtctcgaactcctgaccttgtgatccacctgccttggcctcccaaagtgctggaattacaggtgtgagccaccgcgcctggcaagagacgctgtttctacaaaaaaataaacaaaaaaaattagctgagcatggtggcatgtacctatagtcccagccatttgagaggctgaggtaggaggatcacctgggcccgggggctcaaggctacagtgttcacaccactgcactccagcctagtgtgcagactggagtgatggagtgagactctgtctcaaaaaaaaaaaaaaaagaaagaaaagaaaagaaagatgcggttctactcagcgtcatctgattgctaccctgtaaaagtgcagccccagagttctgagcttctgatatcccaaaagaaatggaaacaggtggcccctggatgaaggaggaggtcaggggtggctggaaggcaggtcctggggagtgtaggggctggaagaagacggagggggaaggtgtggtagacactattataatagctgactgatccttgtgtaccattcccaattcccctcttccctgctgctttccactgtggaggctggaaaagagaaactacttaccttctcagcctttgttgcagctgggagtgaccatgtgacacagttttggccaatgacatctaaggagtctcattagatctcattatgtgtgtgtggcaggggtgggggtggggggtgaggggggcggggtgcctgggaaattattgacgaaagtgacaaacgctttcaattaaccctgaaagtaaccattccttttcctttctgtcttaaatgcggaggcagatgcaacgccaggagcagcatcagccacgctgtaaacaagggggaaacgccaagcgcattacagaggacgtcagccctgccatcactgggctggggaaacaatgccagccatggctggtctccgggttcacagtgataagggaaataaacccttatttgtctaagccattgtgatttgttttccttttttttttttttcagccactttacagaagagggatatttgttaaaattcagaaggagagagaaaaggagagactgcgcaggttgaaacggtggtgggaaaatgtcaaagagagagagactttgtttgcaggtggcaggggcctgagcacgattttgtcacaatagcagattgagcacaggatgtgccaggcacagcgctttatactgatcgacgcgttttaaaaatattttgtaggccgggcgcggtggttcacgcctgtaatcccagcactttgggaggctcaggcgggcggatcacgaggtcaggaaattgtgaccatcctggctaacacggtgaaaccccgtctctagcaaaaatacaaaaaattagccaggcgtggtggcacgcgcctgtagtcccagctactcgagaggatgaggcaggagaatcgcttgaactcgggagacagaggttgcagtgagctgagatcgctcacttgagatcgcgccactgcactccagcctgggcgatagagcgagactccggctaaaaaacaaacaaacaaacaacaaaaaaaaacaaatttgtagagacggggggggggggtctcacaatgttgaccaggctagtctcgaactcctgacctcaagccgtcctcaggcccggcctcccaaagtgctaggattaaggcctgagccaccgcgcccagcagaacgcatttagttctcactgcaactttctgaggcaggctgtgctgttatccccaccacacagagggaactgcggtgctcttcttagacaagaaaagcgccagccagcgggtggtgaggcaggatttgaactcgagcacacggagcccatccagtcccgatggactgactcctccgtcagcggaggagggagcgagtcgttaggtgaacagtgagtgtctcagggtcccgagtgtgaggtggggcgtcggatgtgtcgcggggtcctgcctggccgtgtccgggccgaggcaggggaggacgatccggggcagggcagccagcactgctctccctgagggccggggctgtgcgcgctgcgcggtctgtgcgtgggatacgccgggccccgcctcgccttcccgccccgtctcccagtcctccgccctggccctgccatagggagcccggcccgggggttctgcggctgccgcagccctgacaggggccgggggcgtggagggagcgggccggcgctggcgcagccgcagaactgtgcaggagagactgtgaccccggtggccctctctgagtcttggtttcttcctccgtgaaatggggcttgagcagcgcctcctcgacggggaagagggcccgcagagacagcgcgccagagagtccagggcagcgcagggaaggagcctgtggatccctcccagacccatcccaccgccgatcccgcccaggggcggcccagagcatttcctgaagggcctcaggaaataccaggcccccgcccccaaccctcccgccacccccgccgcccccgcccgtccgcccgctagcgtccagctccctggccgcccctcccccgcctccttccggccggccccctgctcgcatcttggcttgctgaggctgcgggtcttggccgggccttcgagaatcccccgccgcctccccttctggatgtatctgcgccgcctcctttctccctccccttccttccagcccttcattccctcggggcgggcgggcaggccggcaggccccgcgcaaacctggggaaaggtaggtggagggtgcggggtccgataactggcggccacacccagtaggccaggcagctgcaggaaagaggttaaaggagttggaagagattctgggaactcggggaaggaatcagggaaagctgcctggaggaggcgacatttaagtttggactggaagagcaaggcgggtcagacaataattcatgtatttaccaagcatttatcgagcacttactgtgttcaagaccctggggttggggcaggaggcaagataactgtgtccttatgggttttgcagtagggaaaacagtgaaggcaaccatctcacaaactgctggagttgagaccaccagaggggacaatagaatgttagttccatttgatcaatgagaccagagaggactggggtgaaattactttcccacagtcacaagtagtagaactgggattcgaacgtgtgctactgtaacatgagcccctaaccacaggagtctctgtggcttttcaaagcagacacgctgctgcacacaggagcagctgccagcctgccttgcagcagccatggccatgctgcagggcccacccggggcaggtgctggcagaggggacagccagccactggtgggagatcttgccctgggagaggcagcagcggaaattgctgtgggatggtggaggctgtggtggccatgatgtggttgcttcggggcccctgtggttccaaccagggcactgtgcctgccttctgtggcttcttcacccacagagaaccctcactggggccatgtcctgcttcctggagctgagattgagtctgggagcccaggtggaacccttctcactctctggggacctcccaccctttatctcctgggaggctgggctagcattcctgctttatagaagaggaaaccagggtcagagaggcatgatggctcgtccagggccacacagcagaaggcccgtgtctgctcaatgactgaagatacgcggctcttttcttgattctccattcattcgttcattcactcactcactgtaacacacgcacatatcctctgggtactcactattccattgcacagcaacctgaaggcttccagctaagcttgagcacctgaggaccagcgactctgcctgggggcttcatccagcagctgcagcctgctggcccctgccccagaaggccaccgtggtgctagagtaggctgtaaagtgctatcccccgagtagccttgatgcacaactgacctggtgagagttagtgataaacagttctgcatcatcgcccaaggttccccagctgtccatagtgttatgtgctcattcccataccctttgttggctccttcccttccctgtatcattttcctgacaacctgaaggtgattcttgggatctcattcaagccaaaaaccttgcactggaatatttttccggactgggcttctgagggtagcaaatgaagacattcatttattcagtcttcaaacacgattgacctaacctgagcccgccccatgctgggctctgggggtgtgggcatgattcataggcattttctggcctccagagccccttgcttgacggaagaggcaggaacagcttctgatgattctaacccagtgtggttaatgacgtgaccacatctccagggagaatgaccccttctgcctgggaggtcaagcggcatctccaaagatgttcccttccagcttggctttgaaggatgaggaggtgttccccatcgggaccagggggctggggaaatggcattcttggcaaagagaacagcatgtgcagaccaggagcaggagcaaggaggggctgacagatggtggcactagggacgttggcagggtcagactgtgccagccttgaaggccaggggagaccctgggactgtggcgtggtcatgggaaaccaccactgacagttttggagcaagggcaggatttggttttaggaaacgcactttctctggaaagacctacaggtttaacggtccttccttcctcattgtaactcccagcaagtcaagggagtccaccctggtgcagctgaacagcagcatcgctatacgtggagctcttattaacacttcattcactgggtcttcacacccttgagtgaagcatcctttttagtaacctctttttataagtggggaaactgaggcacggtacaggactcaatcaaggtcccatagctaggaagcgggggcattgggattagaacccatgtttcttggccaggcatggtggctcacgcctgtaatctcagcactttgggaggccgaggtgagcggatcacctgaagtcaggagttcgagactggcctggccaagatggcaaaaccctaaacatacaaaaattagccaggcgtggtggcacacgcctgtaatccaagctactcgggaggctgaggcaggagaattgcttgaacccaggaggtggaggttgcagtgagccgagatcgtgccactgcatccagcctgggcaacggagcaagactccgtcttaaaaaaaaaaaaaaaaaaaaaagactgggcacggtggctcatgcctgtaatcccagcactttgggaggccgaggtgggtggatcatgaggtcaggagatcgagaccatcctggctaacatggtgaaaccctgtctctactaaaaatacaaaaaattagctgagcttggtggcaggtgcctgtagtctcagctactcgggaggctgaggcaggagaatggcgtgaacccaggaggcagagcttgcagagagccaggatcacaccactgcactctcgggacagagtgagactctgtctcaaaacaaaacaaaaacaaaaacccaaacaacaacaacaacaacaaaagaagctgtgtttctttggctttaagcccatcctctacgttgcgccactgccatgcttttcagaggctagagggctccaggaaccaccttctttccccggcacagccctgggggtgggtgggtgggcagagaagggacaagcagcccaagtcacagccagggatggagacagcatggcttctttcggagaaatgaagaagcaggagtgttattcttggccaggatgggaaacgggttggaatcttggctcctatgctcaccagccatgtggtctgtggcaagccacatcctctctctgtgtcttgacttacccatctgtaaaatggtggctcctcataacccccacctcatagggctgttgtgaagattgaacgtactgaagactcaaattcttagtacactgccaggcacgtaggaagagctcttagagtgttattttatagccctcatttgagagggtgtgggcaggagcacagcctctgggctccaatccacaaactgccatctactagtccatttgtgagctggctggtaaattcaccttcctgggcctcagtttcttcatcagtaaaatgggataatgatggtgccttcctagttgggttgtggtgaaggttaaatgagatgccatgtagaagtgcagaggagaagggctgctataaggggctccaggtgggtgctgctgttatgattgggcacctactgcatgctgtgtccctgcatacaggagtcgacctttgagacctgcttgttcatggctgtttcacagatgtcgaagtggaggctcagcagggttggaggttcccggagtctcccagctggtaagggcggtgtcaggactggaaccccagccaggctgactcagacatccctggggcctgagcccagcagggcagctgtgactcaagtttgcaggaagaggaggaggagggtggggtaaatgggtgcttgacggaagccacaacctctattccctcagaaatggaagtgcttggtgaggtttggtgtgtccgagccgaagagcagccaatgacaggcctggggatcgtctggcacagcccacttcttgacaaggccttggaaacttggtctctgcagcagcaaccggatttcagcctgggcctcggacacctcggcctgggtacggatgcgacttggatgcagtccttccctggcagtggaggggatgcccaggctggcacaggagtctcgggtcttctccggctctaccccaatctgctgtgtgattttgggcccaggcagggacccctctgggctctgttactggagaaaaggcaaatggctgggacgggtgggtccccagccctccttgcctggaggtctgcgagttggagggctctggggtaaagccagagccgggcccggggagagcctaggctcatctctggtgaacagggtaccctctagccaaagcaggggcaaggcgaggcacatgcccctcatatgggagctggggctgaccccctctcctagccctgcacaccttgagcacatggccttggcccatctgccctgtgggtggacactttccagccctgggtcctgaactctaccaatcagcaggaacctagactcctgaggggtgcagcctggatgggaggtcagggaactgggttcctgagcgcatctctgtgccattcatctctccattggtttcccaaatgtggactgagcacacactgtgagtcaggcctgagctaggttctagggatgctactgtcaacaagacagatgaaggttcctgccctcatggaggggagggagacaataagcaaagaaataaatgcatgatgtaatgtcagccagggagcgatgctgcaaagcagggtgggcgtggggagtgacgcaggccggggttggggaggcatcgttgtagtggtcgggaagactgctccgagaggcagactgagggaaggaggatggacatctagatgtctgagggaagggccatttgggcagaggaaagagcacagggctcagtgtgtgtgggggggaggttggagggggctccgtgtgtaagggtgcgaatggggaagggaggcaggctgcgagtggacagggctatatgtagacttcattctaactgtgacgcaaaggccttgcagggtttgggagggggacatgatctcatttggtcttcccaataactccctgccagaaagagacagagccccaaattgcagtgaggaagctgaggcttagaggacatccctgcacatgtctggggtgtcatatcatcatcggaggagctgggactcaaacccagctctggaacctgctctgtccccagctccatgataacattgtgtgaggtgctgggtgcagctcccaactcctccctgctcaaccatgctctgttagcctgtggtctacagagtggcttcctccagggatgtcttgatgtcttgccttttttttttttttttttttgagacagggtgttgctccattgcccaggctgaagtgcagtggtgggatgataactcactgcagcctcaacttcctgggcttaacagatcctcccacctcagcctctcaagtagctgagattacaggtgcacaccaatacgcctggctaattaaaaaacaacaaacaaacaaacaaacaaacaaaaatatgttttttttgtagagatggggtctcactgggttgcccaggctggtctgaaactcttgccctcaagtgatcctcccgtctcagactctccaagtgctaggattgagccaccacgcccatctgggatgccttgtcttttatacctttactccacaaatatgtgcttaggcattgcttgctgtggccagaaccttgcaggggtgagagacacaggtaaatgagagctggtcccagccctccctcagaaagctgctggaccacagggtgacaaaactgaagctgtctgtcacatccgggagcaggtgctatgaggataagcagccagagaagacccctaacttgatctgtggccatcaaagaaggcacccaaggcaggatgcctccctgaatcctaaagccaattagcagtcagccaggacagctgctagagggggtctaagggggagtggagaggatgttccaggcagagggaacagcagacaggaaggctcagaggtgagtgtgagcaggcagtctcagggaccccagacagttggtgaggctgcagtgctcaggggaggtgtgccaacaggtaagctggcagggccgggtccctgggggctggcttgtcctttctgccattgtctgagagagtgggtggctggtatctggtggcccagatgaagataatggagatgcaattgtgttcttctttctgctcagtgcctctcagttaaggacatttgcaaaaattaataacagcatatgcttttatgtcctccacttaaatttcctttggattaaagaaagtaacggagggaaaggaagaaaagcaggaaggagcgagagagggaggggagaaagagacaaaagaaggaaaataatttggggaaaaaaaatttgtccttttctgggctaagatagccccagcctttgcattttctcacccactgagtcaccagcctcctgccctctttcaggactgtacatcttggcctcttacctactgtgtccgcgtcagcctccctcacagcctgatggcccctgcggcagccccaacccggtttcaggggctaagaaaactacagttgcatgaacgggtggaggtgagtgggaggcagaagcggcggggagaaccagtctgttccgagatctctggaccaaccagtggatcctgatggtcagccttgtctagagccccttccagcgtgcaggccagtcctcctggcattcttctaattacaccgagctgtgagttatgtgtgccaagtatgtgctggattttgtaccaagtgctttccattcatcagttcagggtagtgatgcaggtagctccaggctcagagaggaacagtgacttctcccaggtcacacagctggaaagtggctgagtctggattcaaacccagacttccttgttgctaggacctgtattttcaaccactgcctatgcctctataacgagccagcttatggctgtgttcacgcaaagagaaaagcatccaaatgggaaggctggagaattcaagcaattttcccgcgtgtcagacagtcctgtttccctctcccttcaaaaaaagtcctggattatctctctctctctctctctctttctttttccttttcctttttgttttttttctttgtttgttctttctttctttcttttttttttttttgaaacagggtattactctgttactcaggctggagtgcagtggtgtgatcacagcccactgcagccttgatgtacctgtgtccctggcctcaggtgatcctcccacctcagcctcccaagtagctgtgactatcccgagaagctgagactacaggtgtgcgcatgccatcacgcctcactaattattttactttttgtaaagacaggtttttttcgccatgttactcagactggtcttgaactcctgggcttgagtgatccatcggctcccaaagtgttgggattacaggcatgagccactgcacctggcctgacatctcagtcttgatttgcactttttgcccaaaataatcgagtgtaaggcaggccagaagtggtcagggggcagggacagtccccagcagggtggcaagtctttctgcaacatttttggaatacaagcagaaagtgatttgctattccacacaaaacatgattgggagggcactggatgaatacaactaagatctaagcattacttcaacaaatatatacacagagctaaatcagtatcaggaagtagtggagaagcactcagaataggcacagatctccacagctgttaagagtcttgttactttttttttttttttttgagatggattcttgctctgtcgcccaggctggagtgcagtggcgcgatctcagctcactgcaacctccgcctcccgggtttaagtgattctcctgcctcagcctcccaagtagtttgccttaaggagtgtagacaaaaagcaagggaagcgtccccagagagatcccggcccacagggtcagtgcctcatccccacataacataaaaacagcctgggacaggcgcccatcaccatgcctggctaatttttgtattttttagtagagacggggtttcaccaaattggccaggctggtctcgaactcctgacctggtgatccacctgcctcggcctcccaaagtgctgggattacaggcgtgagccaccgcgcccggccacattcttttttttttttttttttttttttttgagatggagtctcgttctgtcacccaggctggagtacagtggcatgatatcagctcactgcaatctcgggctcccgggttcaagccattctcctgcctcagcctcccaagtagctgggattacaggtgcacaccaccacgcccagctaatttttgtattttttaagtagagacggggtttcaccatgttggtcagtctggactcgaactcctgaccttgtgatccgcccacctctgcctccgaaagtgctgggattacaggcgtgagccactgtgctcggtcagctgtttattgattttgagtatgttattgattttgtgaatggagaagggatcatcgggtagggttctttgatctggagcaaaagatatggattctgattaaccaaaggggaaaaaagaggggggtggatttagtggaaagaactggagtagttcagagaaccaaaggcaagccagcacggtggctcacgcctataatcccaaagacttgggaggctgaggtgggaggatcgcttgagcccaggagtttgaggctgcagtgagccatgatcacgccgctgcactccagcctgggtaacagaacaagactgtctcaaaacaaataaacaaaacaaaacaaaggccaggcttggacaggccaccacccaaggtagctgcaggatctcagaaatgagaattaacaggcaagttttttgtttgtttgtttgtttgtttgtttttgagacggagtctcgctctatcgcccaggctggagtgcagtggcgcgatcttggctcactgcaaactccgcctcccgggttcatgccattctcctgccttagcctcccgagtagctgggactacaggcgcccgccaccacacccggctgattttttgtatttttatagagacggggtttcactgtgttagccaggatggtctcgatctgacctcgtgatccacctgcctcggcctcccaaagttctgggattacaggcgtgagccaccgcgcccggcctgtttgttttttgaggtggattctcgctctgtcacccaggctggagtacagtggcgtcatctcggtgcactgcaacctctgcctcccacgttcaagggattctcctgcctcagcctcccaagtagctgggactacaggcgtgtaccaccatgccccgctaatttttgtatttttagtagagacagggtttcaccatgttggccaggctagtcttgaactcctgatctcatgtgatccgcctgcctcggcctcccaaagtgctgggattacaggcatgagctactgtgcccgaccagcaggcaagtttttgaaggcaacactgctgtgggtggtccacagggtggacagatgctgggcagttaattcaacagaggacctctccaggtggctagggtgttggctgacagcatgcaaatccccagagctctcacctgcagctggcatgtgcaaccccactgaacatgaagcaattttgttctgtaaatcctacctttggatctgagaaccaaatataggttgagatacctggcctaccagtaacctttagtctagactatggaatttcccttctagaaacttaccctgcagttaaatttgcgcaagaacatgtatgagaaacagaatgcagggtataatgtacgtcatctgctggggactggttaaatataggaaggctttaagaatgaggttgggtacaggggctcacgcctgtaatcccagcactttgggagaccgaggtgggtggatcacctgaggtcagaagttcgagaccagcctggccaatgtggcgaaaccccatctctactaaaaatacaaaaatcaggggccgggagtggtggctcatgcctgtaatcccagcactttgggaggccaaggtgggtggatcacttgaggtcaggagtttgagaccagcctggccaacacggtgaaaccccatctccactaaaaatacaaaaaagtagctgggcatggcggcacatgcctgtaatcccagctactcgggaggctgaggcaggagaatcgctgaacctgggaggtagaggttgcagtgagccaagatcacaccactgcactccagcctaggcaacagagtgagactccgtctgagaaaaaaaaaaatttgggccgggtgcagtgggtcacctgaggtcaggagttcaagaccagcctggtcaacatggtgaaaccgcatctctcctaaaaatacaaacgttatctgggcatggtggtgcatgcctgtagtcccagctactcgggaggctgaggcaggacaatcatttgaacctggaacaccgaggttgcagtgagctgagattgtgccactgcactccagcctgggcaacagagcaagactctgactcaaaaaaaaaaaaaaaaaaaagagcctgggcgtggtggctgacgcctgtaatcctagcactttgggaggccgaggcgggtggatcacctgaggtcaagagttcaagaccagcctggccaatatggtgaaacccagtctctactaaaaatacaaaagaattagctgggcatggtggtgcatgcctgtaatgccagctgctcgggagcctgaggcaggagaattgcttgaacctgggaggcgtaggttgcagtgagccgagatcgtgccactgcactccagcctgagcgacagagactccgtctcaaaacaaacaaacaaacaaacagaataaggcagttctcttttggtgggtgtgcaacaatctccaagagttacactgttaatgatataagcatgaggtagtgtgtggagggagttactgtttccatgcgtgggggtgaaggaaatacatacaataagattatgtcagaatctctgttacactgtaacagtgattgccattagggaggggacctgcagatcaggagaaacagtaggagggagacttgttgcatatgtccttgtgcactgattgaactttttttctgtgcatgtattttttttttttttctttttcttcgagatggcgtattgctctgtcacccaggctggagtgcagtgatgcgatgtcagctcactgcaaactccgcctcctgggttcaagcaattctcctgccttagcctcctgagtagctgagattacaggcatgtgccaccacgtctggctaatttttgtacttttttttttttttttgtagagatggggtttccctatgttgcccaggctggtcaaatgctactcttttgagcagacttctttgtattacagtttggagtggttatgttttaactctcaagccaagctgaaagttttaagtgtgtgaaacttgtctgtaaattttctgaagaagcaagcaccgtgcccttctgaggcaggtgaggagctacggctttctcagaacacactaagagtctcttgtagaaaggtgctatgcacatttccaaagaaggggcgctctgagagaggacagcagagaatagtggatagatgttggtccctggctctgactgacatgtgaaaatctcagcctatcagctgggccaccagctattgcccctctctgcacctcagtttactttgctcatctgttaaacagtgataagtgtgcctgtcctaccctgttgcaacgatctgtcaagaaaacaagccaagaccgggtgccgtggctcatgcctgtaatcttagcactttgggaggctgagtcaggcagatcacttgaggccaggagttcaagaccagcctggccaacatggtaaaactgtgtctctactaaaaatacaaaagttagccgggcatggtggcctgcacctgtaattccagctactctggaggctgaggcaggagaatcacttgaacctgggaggtggaggttgcagtgagccgagatctcaccactgcactccagcctgggtgacagaaaacaaaaaagacctgaagccaaggttgtgtctgtttactaaaacaatgcacgtgaaatgttttgtccaggtagttaccatttctttttctttgggtgggaggggggtgttgtttgctttttgtggttgtgtttttgtgttttgtttgtttgatttgtttttgagacaaggtctcgctactggacccaagcgattctcccacctcagtctcccaaagtgctgggattacaggtgtgaaccaccaggctcagcttatgataactgtttcaagtcagaatttgacaatctgaagaaaactttttttttttttttgagacggagtcttgctctgttgtccaggctggagtgcagtggcgtgatcttggcttactgcaacctctgcctcccgggttcatgggattctcctgcctcagcctcccgagtagctgggattacaggtgtgcaccaccacgcctggctaatttttgtatttttagtagagacggggtttccccatgttggccaggctggtctcaaactcctgacctcaagtgatccacccacctcggtcggcctcccaaagtgctgggattgggattacaggcatgagccactgtgcccagccaaaaacattttttttttcttttgagaaagagtctcaccctgtcacccaggctagagtgcaatggtgtgatctcagctcactgcaacttctgcctcccaggttcaagtgattctcttgcttcagcctcccgagtagctgggattacaggcatgcaccaccacgcccaggtaattttttgcgtctttagtagagacaggttttcataatgttggccaggctggtctcgaactcctgaccttgtgatccagccacctcggcctcccaaagtgctgggattataggcgtaagccacggtgaccagcctgaaaacgttttctaaatggcccattttgtttggaatcttcaccactttgggaaaaagcctaaagattaatggaacagaaatgtgccataagatcagagactagatattgagtggatgctatctttttttttttttttttttttttttttttgagacggagtcttgctctgttgcccaggctggagtgcagtggcacgatctcagctcactgcaacctctgcctcccaggttcaagcaattctctgcctcagcctcctgagtagctgggattacaggtgcccgccaccacgcccggctaattttttggtatttttagtagagacggggtttcaccatcttggccaggatggtctcaaactcctgaccttgtgatccaccctcctcggcctcccaaagtgctgggattataggcgtgagccaccgcgcccagccacggatgctatttttatagttacacattatgctctagggaggaaaaatgatgaaggtcattgaaatttgcttatgaaatataattaaagctctggaagaaagatattatgtaaatcccaagcagaatgatcagtttattaattgatttaatgaagactgaaagtatgaaagtttggaactatcaaaaaagctaaatggaaaccatttcaaaatggggttacttaatcccagcactctgggaggccgaggcaggagaataacctgaggtcaggagtttgagaccagcctgaccaacatggtgaaaccccgtctctactaaaaatacaaaattagccgggggcggtaacgcgtgcccgtaatcccagccacttaggaggctgaagcaggagaatcgcttgaactccggaggccgaggttgcagtgagccaagatcgagccactgcattccagcctgggcaacaagagcgaaactcggtctcaaaaaacaaaacaaaacaaacaaaaaaacccacaaaaaacagaaaatggggttactatcaggaatctggatactgactaatgaaaatgcaagtgggctgggcgcggtggctcacgcctgtaatcccagcactttgggaagccgagccgggcggatcacgaggtcaggagatcgagaccatcctggctaacacggtgaaaccccgtctctactaaaaatataaaaaatgagccgggtgtggtggcgggcacctgtagtcccagctactcgggaggctaaggcaggagtatggcgtgaacccgggagacggagcttgcagtgagctgagatcacgccactgcacttcagcctggtctacagagcaagactccgtctcaaaaaaaaaaaaaaaaaaaaagaaagaaaatgctagtggtctggctgaagaaggagaagagggaattcattagtgtggtgggcactcctggtcagcatttgttcttgtcgcaactccgggaatgagccctgatttgactacgccaattatcataattccccatttcaccctcccatgatccaagttcttccattcagagcaagcctaggattttagtttgctgaattgagagaaagagatgctctctcttccttccttccttcctcctttcctgtcttcctttctctctttctctctctttctctctttctttttctctctttctctttctctctctctctctttctttctctctctttctcttttctttctgtctcgctctgtcatccaggctggagtgcagtggcatgatctcggctcactgcaaccttcgcctcccgggttcaagcgattcttctgcctcagtctgccaagtagttgagactacaggcgcgcatcactatgcccagctaatttttgtatttttagtagagatggggtttcaccatattggccaggctggtctcgaactcctgaccttgtgatctgcccatctcggcttcccaaagtgctgggattacaggtgtgaaccactgcacccagactgctctctgttttccatggcatggccagagatctgaggcatggatgtgccacagccaatctgcagctagtcaagacaccagccaaggaaaatggccacatgtccaagaggcatatgctaaagaatggagccagagccttgatcgcactgcacttgaaccctagctctggaaattttggttaaatgagccaattgattccaattatcatttaagccagtttcagtggggtttttctcttcctttctttctttctttctttcttttttttttttttttttgggtagggtcttgctctgttgtccaggctggaatacagtggcacaatcatggctcattgcaacctcaacctgctaggcttaagggatcctcccgcctcagcctcccaagtagctgggactacaggtgagcaccaccacgtccaactaagtaaaaaaaaaattttttttttaagagacaacgtcccactatgttgcccaggctggcctcctactcctaaactcaagtgatcctcccgtgtggagcaccaaaactgctaggattataggtgtgagccacctcagctggcctgggttgggttttctttttctgttttttttttttttttttttttgagaaggagtctcactctgttgccaggctggagtgcagtggtgcaatctgggctcactacaacctctgactccctggttcaagcaattctcctgcctcagcatcctgagtagctgggattataggcacgtaccaacatgcccaattaatttttcatatttttagtagagacagggtttcaccattttggtcaggatggtcttgatctcctgacctcctgattcacccgccttggtctctcaaagtgctgggattacaggcgtgagccactgtgcctggcctgagttgggttttctatcacaatagttccaaaaaatgtattggcttgtgtgctgaaaagtctatgcttaaagcttcaggcatggctggctggctggttcaaggtgcttaatatcagcaggactctatcttttctctcatctctgttcccatctgtgttggcttcattcttaggctggttctccattatggagctactccaggcttatatcccactagctcagtaacctgataggaagagaagcttctttttttcttttttttgagacggagtttcactcttgttgcccaggctggagtgcaatggcacaatcttggctcactgcaacctctgcctcctgggtttgagcgattctcctgcttcagcctcccaaccaagtagctgggattacatgtaccaccacgcctggctaactttttttttttgagatgaagttttgctcctgttcctcaggctggagtgcagtggcatgatctcggctcactgcagcctccgcctcccaggttcaagcgattctcctgtctaagcctcctgaatagctgggattacaggtgcacgccaccacacccagctaattttgtatttttagtaaagacggggtttcaccatattggccaggctggtctcaaactcctaacctcaggtgatctgcccgcctcagcctcccaaagtgctgggattacaggcatgaaccactgcaccccggcccctagaagcttcttttttcaatgatttctgtagaagtcccaggcttggcttgagagtcattgctctgctatgagtcaggtgcccattcctgaactaatcactgaccagggagggaaagctctgattgactcaggctcagagctggaagggagaaggagtcgctcccttcagcctattcagattcttcccaagagtttagttttaggcatggtggctcatccctgtaatctcagcactttgagtgggtggctgaggcagggggatcaactccaggagtttgagaccagcctgggcaacattatatgatcctgtctctacaaaaaaattggaaaaaatagccaggtgtggtgtagtcccagctacttgggaggctgaggtaggaggattgtttgagcctaggagattgaggatgcagtgaaccatgattgtgccactgcactctagcctgggtgacagaacaagacccggtctctctctcacacacatacacacacacacacacacacaaaaggctgggcatggtggctcactcctgtaatcccagcactttgggaggccaaggtggacagatcacctgagttcaggtgttcaggaccagcctggccaacatggtgaaaccccgtctctaaaaaaatagaagggccgggtgcagtggctcatgcctgtaatcccatcactttgggaggccaaggcaggcggatcatctgaggtcaggagttggagaccaggctgaccaacatggtgaaaccacgtgtctactaaaaaaataccaaaattagctgggcatggtggcacatgcctgtaatcccatcactttgggaggccaaggcaggcggatcatttgaggtcaggagttcgagaccaggctgaccaacatggtgaaacggcgtgtctactaaaaaaataccaaaattagctgggcatggtggcacatgcctgtaatcccagctactcaggagaatcgcttgaaccagggaggcggagggtgcaatgagccgagattgcgccactggactctagcctgggcaacagagtgagactccatcttaaataaataaataaataaataaatttagaaatacaaaaattagccaggtgtggtggcacatgtctgtaattccagctacttgggaggctaaggtaggaaaattgcttgaacctgggaggcggaggttgcggtgaactccgcgccactgcactccagcctgggcaacaagaacgaaacttcgtctcaaaaaacaaagaaaaaaagtttagctttggagtttaggcttgggttttccagggttaccactttttagctgtgttatcttgggcaaataatggaagctttctgaacctcagctgtaaaataaggataacggtagtctctacctcttagggttttttatgaggaggaaatgaggtactgcatgcaaaacatttgcacaatgctcactactttgttgtcattgttactagttcctttctccagcacctgcacttccaggatgttggcacaggtccttccttccccatgggctagaaggaaacttcctcctgtgagagctgtcatagctctttctcttgattgtctatgtggcatttggtttctgctcatgttcatgctgcccaaactcaaaacttctctgtcctagactttcaacccctagaagggaaaggatggctccattcttttcaatgtccttaataagagaactgccatcaacacccatccagtgcatttacagtttccaaagcatttcctcctctgccttttcacctgagccagaatgcaatcctagggagtgggaggggttattattcccacttcacagatggggaaactgaggtccagggaggggcagtgacgtcatggtcaagcagcaagtcggtggacaagaaattaggtgtttctggattgccaacacaagtttctttttgtgggacaaatagttttgaatatagagttcaagcctttggtgaagatcccggggagcctgttctgcacctgtgctaagtgattcttttcattcagcatgcagtctgtccctgtctgctgcctgccagtctttcccccaaagtcccttcctgcttgaaaccctccttccctaaccccagagacacccctggcctgcactgccagctctttcttctgaaatacacctctccaaccggcccccatcagtctgctccattatccacctggaaccaacctccaaacctctgcaagggcagatgagagtgtctcctccagccctgttttccatggactgctttgggcacggatgaaattgttcagcttatcctgcaagttcctctgcaagactgcttatgtgctctagactcatagaacctggaattgaatcctagccctgccacatgctgcctcagtttccgcatctaaaataggaatagggctgctgacgtcaagggatcatcatgaggatgaattgagagaggaatgccagggggctgatacgcttcaaggagggggtccaggaaagagaaatgactttgaggaatgcaagaatgtcccctctgaccttgcacgtggcggtcttccggcctcaggacaccctcccccacttctcaagcctgggctaatctggtgttctccaactcacttcctgtcctgtaggttagctcatcatctcattatctgtatccagttctctttccaggcttgcatattatctgtgcggctacacacacttgctaggtgggtagtgaagggagtattaggctctgcatatggaaaagtgggcctgggtggccaagccccagcatatctccaaacctcaatttcttgtctgtaaaatgtgaacagcaagaatgtgcaccttgctgggcacggtggctcacacctgtaatcccaacactttgggaggctgaggcgggaggatcacgaggtcaggagttcgagaccagcctggccaacatggtgaaaccctgtctctactaaaaatacaaaaattagccaggtgtgggggtgcgggcctgtaatcccagccacgtgggaggctgaggcaggagaatcacttgaacctgggagatggaggttgcagtgagctgagattgtgccattgcatttcagcctgggcaatagagtgagactccgtctcaaagcaaataaataaaaaaagaatgtgcacttgtggaattgtggtaaggttttagaccagcactggtcagcatggtagcatctagccacatatggctatttacatttaaattaataaaagtttaatgaagtttaaaaaattcagcccctcagtctcactagccacatttcaagtgctcgctggcctcctgtgactcgtagctatcctacggacagcacgcagaaagaacatttccatcgtggagggaaattctgctgaacagtgctgatttagaagcatcacgcccgtgctgtgcatcagctctgtgttataactcatctgacattgtaaactcagggcagaagcatgattgcagtgtaaagttctgctttccttggagatggggtaaagaggtgaggctcacaaggaatgttggactggttgagggcattctctgggatgagggtggaccaagttcaaaacggggagctccggcttctgctgcaaggcaggcacatagggcataattccctctgctggtggagaaggggcaccaagcagtgggaagggtggttaactggagagtgtttctagcatctagagctaccagtgtttgacttttcaaaggaaaagtggctatgtggttttgcaaacgtgttacaagctctctccatttttatcgtatttattgtatcactagctagactaataaagaaaaaagagaagatacaagtaaacataatcagaaagggcaaagaggacattaccaccgaccccatacaaacacaaaaaagccctcaaaaactattatgaacacgtctatgcacacacactaaaaaacttacaataaatagatgaattcctggaaagatacaacctttttttttttgccagagaatggaattccagatcctgggttgttagaaccttaagggatactttcatcccctggttcctgtacagggaggaggaatctgaggctcagagaagtacagtgacttgtttaaggtccctcagtgagttagggcagaggaagacttctggccacagcttccctgaagccaaggctaggcagagtgttgatgtcacccaggcaacagggatggtgccctctgcccacctagcaagccctgactcatgctccgcgcccctgctgtgagaagtctctgctgactcccaccctgattggagcaggttagtcagctttgaggtgcagcctccagttctggcccctccagttccgggactctcattcgaggcatttggggctgtctcatttctgtgcccagcacagggcttggcacagaggaggtgctttgtgggtgcccgccagtcaagggtttccgttttcgtgccatgtaggtaaccccttgccattcgtgcccttaggtaaccccttgagcagcctaaagaagcctagagacttctccgtttttgagtatattttattgacgtgaaatacacgcacggaaaagcgcacaaatccaaagtgtacttccgcgcatcttcataaagtgaacacacttgtagcctaagaacccaaccctaccagcgcccggcaggccctggcccccttccagtctctcctactgaacaaggtttttgagtgaaaccggcaggccggagcgtgagtttctgcttgacggggcggggtctgcgcgtgctgcccggccgtgagtgtgggggggccgtgagtgtgtacggggtggagtggcctgaaggggattagagtgcgcgcgttcgggtattaatttgccagggtttgtgtggcgctcgggattgggggttttttgggggctcgggcgtcgactgtggggcgctgcggaagggtgggtcgtccgcgtggggtcctggagcgcaggaggcggaggggaagccgcgcaggggccactagggaggggctctggcggggtcgcaggggcgcggtctgcgggcgtgggggcgggacctcgggggcggggcctgagggcgcgcgcacgcctccggcgcgccccctcccggccgccatgttggctggtgtgtgggtgtcaaactgagccagacgcggcggtggcggcggctccgcgggctacggtcgctcccgcctctcgagcgctgccggtggccgcagcggcgcacccgcacccggccctaaaagtactttttatagagatggggtctcactctgttgcccagactggtctcaaactgcttatctcaagtgactgactgtctgcctcagctgcccaagtagcagggattacagacacaagccacagccgctggctctattcaggaacatcttagttccaagttttgggaattatggataaagctgctatataaacaggtgtgcaggtttttgtgtggacattttcaactcatttgggtagacaccaagaggcacgagttctgatcataccgaaagtgtttagtttcagaagaagctgcttttcttgggctccataacaaaatacacagactttgtggcttaaataacacaaatttatttcttacagttctcagtcgggcgcggtggctcactcctgtaatcccagaacttcgggaggccgaggcgggcggatcacctgaactcaggtgttcaggagcagcctggccaacatggtgaaaccccgtcgctatttaaaaaaatagaagggccgggtgcagtggctcacgcctgtaatcccagaacttcgggaggccgaggcgggcggatcacctgagatcacgcgttggagaccagcctggctaacatgctgacaccccgtttctgccaaaaaaaaaaagcctggagtggcgtgtgcgcctttaagccccggctactcgggagggcttaggcgggagactcgcttgagcccgggaggcagttgttgctaggagccgagatcgcgccactgcactccagccggggccggcagacagaacaagagacccggagaccccgtctgggggtgggagtggcgggcgggaaacggcgacaaaagagggagcgagaatgggagaaaacgcaaaaagagacaataggaggtgccacacagcatcccccgcctcgcgccaagactaaaattaaaaagccaccccgagaaaacccaagagccgtcaccgctgaaacaggaggcgaaaacctttctcgcgacattgccaagcaggagcgaacagcccggaaacggcccggagtttacgagctagtctctgtcattgagccatcaagaaggaaaaaccactcagaccgcgttctctccctctcactccccaatacggagagaagaacgatcatcaatggctgacggcagttgcagccaagcaacgccagaaagccggcttcacgctcaggagaaaacgctacctctcttcctcggggttttcggtgctctacacgttcaaagaaacttctctagtaacacactatagaaatgatccctgaaagtatagccttaacggcctcctcgcacacctctgctaggtctacatctgccgcaaacttttaactgatggcgagaaactttcgctagttccgatgccattaggaaacaaataggaaaatagtttggcaataacagcttgtcgaatattatcacttgacaaattttaacgttttaggtggaaaggtaattttaaaagttgttttaagaggtttaaaaccgggcatgcttaattagcataatactgaatgacagccaatcacaaactgaatttttaaaaccggaagtgtttgctcctggtgtggtgcgcccgcctgtaatccgggaatcccagcgttttgcgagcccacgcccaggcccaggagggaggatcctttgttctatgagttcgacaccagcccaggcaatatagcggaatcccgtctctaccaagggggcgggaatcaacaatgagctgggcgtgatggcaccgtctgtagtcccagctactcgggaggctgaagcgggatgatcgtttgagtcagggaagctggctgagttcaaagctgcagtgagctctgatcagttaccccactgcaccccagcctgggagacagagtgagatcttgactcttaaaaacaattttttttttaggggggatggtattaaatagatacaaaatttaccattttaaccatttttcacatatacaattcagtggcattaagtacattcgtgtagccattggcatgtaaccatcaccattatttatctccagaactttttcgacatcccaaactgaaactctacccgtaaaacaaacttccctttcctccctccgcccagacccctttaaccactattctactttccgtctctatgaatttgattcttgtaggtatctctataagtggaaacatgcaatattgtccttttgtatctggcttatttcacttagaatgacgttttcaaggttcattcacgttgtaacatgttgcagaatttcactcctttttcaggctggagtgcaatgatgcatgatgtgacagctcactgcagccttgacccccagggctcgggtgatcctcccacgtcagcctcctgagtagctgggatcgtaggcacatgccatcacgctccgctaattttttgtattttttgtagggagggggtttcaccacattgcccaggatggtcttgaactcctgggatcaagggatccacccgcctcggccgctcaaagtgctgggactacaggcgtgagccaccacgcccagcggttttcttaattacatttttgaattgttccttgccagtgcataaaaacacaactggaccgggcacggtggctcacgcctgtcatcctagcactttgggaggccgaggcgggtggatcaccaggtcaggagatcaagaccatcctggccaacgtggtgaaacctcgtctctactaaaaatacaaaaactggccgggcgtggtggcctgcgcctgtaatcccagctactggggaggctgaggcaggagaattgcttgaacccgggaggcagaggctgcagtgagccaagatcacgccattgcactccggcctgggcgataagagcataactcctcaaaaaaacaaacaggaaaccacacaactggtttttgtgagttgatcttgtgtcctgaaactttgctgcatttgcttattagctctagtaattattgtgcgtgtattctttgggattttccctatttaaagcgatggttttatttcttatttctcaatttggtgccttttcttacctaaaggctctggctacaacttctagcaaaatgttgactaggccaggcgcggtggctcacatctgtaattccagcattttgggaggccgaggcaggcagataacaaggtcaggagctcaagagcatcctggccaacatggtgaaaccctgtctctactaagaatacaaaaattagccaggcgtggcagtgcgcacctgtagtcccagctactggggaggctgaggcaggagaattgcttgaaccccgggggcagaggctgcagtgagccgagatcacgccactgcattccagcctgggcgacagagcaagactccttctcgaaaacacaacaaaaccaacaaaacaaaaaaaaaaacattgagtagcagtggtaaaggtgaacctctgtgtcttgttcctgaacttagggggaaagcttttagtctttcaccactaagtatgatggtaactgtggttttttcacaaataccttttataatgttgaggcagatcccctcgtttcatagttttctctatgttttaatgatgaaatgttagaatttcttagatgctttttctgtgtcagctggaatgactgtttttttccctttgttctactaatgcggtacattacgttaacggattttcttatgttgaaccaccccctgcattcctgggatgaagccctcccatcccctcagctgcagcacctgattaaagccttcttccttggcaagaatcgttgtctcactgattggctttctgtgaggtgagtggcaggccctagatggaacccctggtgtttgagtaacaccaggatggccagtagcctccagacgccggaggagtcaaggaaggatcccccttcgaggcttcaacagtttgattcctgactttgagcctccagaactgcgagagaataatttctgttttgacagagtttcacttcatcacccaggctggagtgcagtggcacgatctgggctcactgcaacctctgcctcctgggttcaagtcattctcatgcctcagcctcctgagtagctgggattacaggcatgcgccaccgcgcctggctaatttttgtatttttagtagagacagggtttcaccatgttggccagactggtcttgaactcctgagctcaagtgatctgcctgccttggcctcccaaagttctgggattataggtgcaagccaccatgcccggcctacatttctgtgtttttttttttttttgagacggaatttcactcttgttgcccaggctggaatgcagctcttggtgtctacccaaatgagttgaaaatgtatgtccgcacaagcctggaaacatatgtttatagcggctttatccataattgccaaaacttggaactaagatgttcctaaatagagccgggggcggtggcttgtgtctgtaatccctgctacctgggcagctgaggcaggcagtaacttgagatcaggggtttgagaccagtttgggcaacagagggagaccccatctctataaaaaaaatacttttagggtcgggcgtggtggctcatgcgtgtaatctaacctctttggaaggctgaggcgggtggatcacctgaggtcaggagttcgtcaccagcctggccaacatggtgaaaccccatctctactaaaaatacaaaaaattatctgggcgtggtgtcgggctcccgtaattccagcgattcggaaggctgaggcaggagaatcacttgaacccaggaggcggaggttgcagcgagcagagatcttgccattgcactccagcctgggcaacaagagcgagataccatctcaaaaaaaaacacaaaaaccaaaaaacttaaaaaaaaatagactgggtgtggtgactcatgcctgtaatcccagcactttgggaggctgagacaggtggatcacgaggtcagaagatcaagaccatcctggccaacatggtgaaaccccatttctaataaaaatacaaaaattagccgggcgtggcagtgcgtgtctgtagtcccagctacttgggaggctaaaacaggagaattgcttgaaccggggaggcagagagtacagtgagttgagatcgcgtcactgcactccagcctgggagactctgtctcaaaaaaaaaaaaagaaagtaaaagaaaataaaaaaaagaaaaaccccaaaggcaaaacactacaagaggcagaaaaagagtggaagacaaaaatagaaacaaaggcaacaaatagaaaacagtaaaaacaaaaaaaggcagctattaatccaattatatcaacatccctttgcatatcagtggtccagatgaaccaattaaaagacagagattgtcagagtgagcaaaaaacaagacgtaactatatgttgcttacaagaactacactttaaagacttatgtattaaaagcgaatggataaagaaagatctatgccaacactgatcaaaagaaagcaggagtctctatattaatttcagacagtacagacttcagagcaaggagagtcatcaggaataggccaggcacagtggctcacacctgtaatcccagcactttgggaggccaaggcgggcagatcgcctgaggccaggagttcgagaccagcctggccaacacgatgaaaccctgtctttactaaaaatgcagaaattagcagggcgtggtggtaatcccagcctgtaatcccagctactctgcaggctgaggcacgggaatcgcttgagcgtgggaggcagaggttgcattgagccgagatccctgcactccagcctggttcgcagagaccttgtctgaaaaacaaaaagaaaagaaaagagagtcatccgggataaggacagggcattacataatgattaaggagtcaatgctcaaagaagacataacagtccttaacatgtatgatcctaacaagagaacatcaaaatatgtgagggaaaaagcgacagcaccgcaaggagaaactattatagttggcgacttcaatgtccctctatcagaaacggacagatccagcaggcagaaaatccgtaactcagtaacaccctctataactggatataatggaaacctatggactatttcatacaatgacagcagaaaaaaaagaaaagaaaaacgctttggtttttcccgtatcttaggctggagagcagtggcacgatcacagctcactgcagccttgaactcctgggctcaggagatcctcccgcctcagcatcctgtctagttgggactacaggtgtgcactaacacacgtggccaattttctttctttctttctttctttctttcttttttttttttttgtgacggagtcttgctctgtcgcccaggctggagtacaatggcacaatctcggctcactgcaagctccgagaatggagaatggttcacgccattctcctgcctcagcctcctgagtagctgggactgcaggcacccaccaccatgcccagctaattttttgtatttttagtagagatggggtttcaccgcgttagccaggatggtcttgatctcctgacctcatgatccgcccacctcgacctcccaaagtgctgggattacaggcgtgagccaccgcgcccggcccttctttctttctttttaaatttttttcatcatgcagctcaaaatgtcataatttttaaaaatttacttttctgtagagatgggatcttgctatgttgcccaggctagtcttgaactcctggcctcaagcaatcctcctacctcggcctcccaaagttctaggattacaggtgtaagcctgagtcaccatgcctaaccacaaatatatatttttattttttgagacggagtttcactcttcttgctcaggctggagtgtaatggcatgatctcagctcaccgcaacctccacctcccgggttcaagcaattctcctgcctcagcctcccgagtagctgggattacaggcatgtgccaccatgcctggctaattttgtatttttagtagagatggggtttctccatgttggtgaggctggtctccaactcccgacctcaggtgatccgcccgccttggcctcccaaagtgctgggattacaggcgtgagccaccaagcctggcccaaataaaatgtggtgttttgtttgtttttttagatggagtcttgctacgtagcccaggctggagtgcagtggcacgatctcggttcactgcaacctccgcctcctgggttcaagcgattctcctgcctcagcctcccaagtagctgggaccacaggtgcgtgccaacatgcccggctaactttttgtatttttagtagagacggggttttaccatgttagccaggatagtctcgatctcctgacctcgtgatctgcccaccttggcctcccaaagtgcggggattacaggcgtgagccaccatgcccagcctatagatactttaaaaaaacattttatttgtcacgggtgccgggtgagcgaccacgcccggcaatgatgagttttatctgggctgttatacatctgagaaacgtccaggggatggcgcccaagaggcatttggagctcagagaagaggtcaaaggtggacttggtggggttagggaggctcttggggctgtgggagtggttcctgaactgtgatccgcactgtcccccaacttacatacccagaacagccaggcttgggtaatagtgggatctctcaccctcaaagggccaaactgggtagaactcagggcttcctttttttttttttttttgagatggagtcttgctctgtcgcccaggctggagtgcagtggcacagtctcggctcaccgcaacctccgcctcccgggttcaagtgagtctcccgcctcagcctcccaagtagctgagattacaggttcatgccaccatgcctggctaattttttgtatttttttttagtagaaatgggatttcatcatgttagccaggctggtctcaaactcctgacctcaggtgatcctcctgcctcggcctcccaaagtgctgggattacaggcgtgagccaccacgcccagccagggcttcctttttaggatccaaagttagggagaagctgaggccaccctggctggtctcttagccctggaaggatctgactgaccgtgattaatgagtcttttcactctagcggcaccaagatattccaggtcccagcttggtagtgccgggagccagcaatgagtccgctccaatggagctcaggcaccagcaaggacaggggggcagacaggggcaggggtcatcaagacagcaggcatggcttaatagccatcctagggatgtgaagggtgtgtcattgtgggttcgacttgcatttccctaatgacaaatgaggttgagcatctttcaggagctgtgagccatttgtataccttatttgaggaaaagtcttttaggatcctttgcccatttttaaattgtgttttaaattgttgtttgtgttctagtattgaattctatgagttcttgtgtattctggatatgaaactttcaccagatttgttatttacaaatattttcttccattctgtaggttatcttttcactttcttgaaagtgtcctttgatgagcaaaagttttaattttgataaaatacaatttatcatttcattgcttgtattttgagtatcatatcaaaggttccattgacaaatacaaggcatgaaaacgtacccctgcgttttttatttttatttaattattgttatttgtttgttggttgtttctggtttttattctttgagacaaggtcttgctctgtggcccagcctggagtgtagtgatgcgatctctgctcactgcagacttgacttcttgggctccagtgattctcctgcctgggctttccaaagtgctgggattacaggcgcgagccgccacactcagccatttttttttttctttatcaagatttttttggccgttgtagatcatttgcaattccatatgaatttcaaaattagctggtgaatccctttaatgaatgttttatttcagttactatacttttcttttctttcttttctttttttttatttttttgagacagagtttcactcttgtcgcccaggctggagtgcagtggcgtgatcttggctcactgtaacctctgcctcccgggttcaagcgattctcctgcctcagcctcccgagtagctgggattacaggtgcccgccaccatgcctggctaattttgtatttttagtagagatggggtttcaccatctctggcctccaaaagtgctgggattacaggggtgagccactgcacccggctattttagttactatacttttcaacttcataatttccatttgttttttttttttataatttcgattttttttttttttaattcggagtcttgccctgtcgcccaggttggagtgcaatggtgcaatctcagctcaccgcaacctctacctcccaggttcaagggattctcctgtctcagcctcccgagtagctgggattataggtatgcaccaccatacccagttaattttttttttttttaatctttagtagagacagggtttcaccatgttggccaggctggtctcaaactcctgacctcgtgatccacccgcctcggcctcccaaagtgctgggattacaggcgtgaaccaccgtgcctggcaatttctatctttttatcggtattctctatttgatgaaacgccatcatcatacattcctttatttatttagtcacagtttcctttggttttatgaacgtgtgtataatggctactttaaagtctttttctgataaatcaacatgtgccctctcacaggcagtttcctttgcctgcatttccccctatctatgggtcatgctttcctgtttattaaattttttgcaggcttcatatttttttttttttttttggaaacaggacatttaaataatacattgtagcaattctgggtatgagtctcccctgacctgggcttgttattattttcttgtttatttgtttagtgactggctggattgttttagtgaagtctatttcttccgtacgatgttcagcttctatggtcgttctcagggggcccagctttgagtatgcctgcagttactctgggatgacagtggttttggaaggctctcttcctctttccctgaccatatccagctgttaagctatgcaaattttcttttcttttttctttctttctttcttctctttttttttttttttttgagatggagtctcgctctgtcgcccaggctggagtgcagtggcacaatctcggctcactgcaacctccgcctcccgggttcaagcaatcctctgactcagcctcccaagtagttgggattacaggcacctgccaccacgcccggctaattattgtattttttgttttttagtagagacggggtttgaccgtcttggccaggctggtcttgaactcctgacctagtgatccacccacctcagcctcccaaagtgttgggattttaggcatgagccactgcacccagcccttctttttctaatccttgcttggttgaaataagctctgcaagttgccaatggattgctttataatttcctataatgccctgcactacacactgatcctatcaagtttggctccttggaagaaatagtgtgtgaggtcaatgtctgctatttgttctgacctcaggagggctccctctactggtgctattccctgttctctcctgtaaacgagcagcctagagttcagcttgtgtcttgaatcttctcctaattatctctcaccataatctctactattctcaaaagcaccttttgggccgggtgcggtggctcacgcctgtaatcccagcactttgggaggctgaggtgggcggatcacctgaggtcgggagttcgagaccagcctggtcaacatggtgcaaaccccgtctctacttaaaaaaaaaaaattagctgggtgtggtggtaggcacctgtaatcccagctactcgggaggccgaggcaggagaatcgcttgaacccaggaggcggaggttgcagtgagcggagatcgcatcactgcactctcaaacaaacctaaccaaaatcaaaacaaaagcaacttttgccttgaattccttcgttctctgtagcaaatgaggtcagttgctttgggaagagattaggaagtctcttttttatggcctgtttcttcattagacaaaaatctctctgagccagggccctggagctgggggtggagactttggaaagcttctctctgagtgacaccctgcgctaggggctgaggacttggtgggagtggggacaatggccgaggtcctcaaagtttgcctctcctgttgtcgagctacttccacatgagccagggccggagtgatcaggaccccagcactcgcagcacactgcacccaaggcagagcctctgttccttgagtggggctgggtgcaagaagggggcccccaactcttggctacactcatccaggacttagtctcagcaacaggtggctgggggtagaataggaaatggatgtcctgttcttcgtgggaggcaagccctcccactgggagctgggggcagagggagccctgtttccctggtctggaggcagcaggggaccccatgttcttggctgcagctgtccagagtggagtctcagcctcactgagctgagaggaagggcaagaggggccatgatctcagtgcaaacaccatggcctcacctttttaaaccaaatattcatagatgttcatgaatccatgtttcttcatttgcattttctttttttttttccagacaaagtctcgctctgtcctcagaggcaggagtacaatggtgtgatcatagctcactatcaccttgaaatccaggaccgaaacgatcctcccacctcagcctcctgagtagctgggattacaggtgagagccaccatgcctggcctatttttgttgttgtttatttttgtagagatgggttctcactatgttgtccaggctggtcttgaactcctgggttcaagcattcctcctgctccagcttcccaaagtgctgggattacaggtgtgagccaccatgcctggcctgtttcttcattttcttttctttctttctttctttttttttttttttttctgagacagagtctccctctgtcacccaggctggagtgcagtggcacgatctctgctcactgcaatctccacctcccaggttcaagtgattctatttccaagtagctgggactacaggcgtgcgccaccatgcctggccaatttttgtatttcaagtagacacagggaggtggaggttgcagtgagctgagatcatgccactgcactctagttcaggcaacaaaagcaaaactctgtctcaaaaaaattttttttcagggagttctctcaggtgtttcagccaatctctgatgataaaaagttccccaatcagcctgtttggagtgttccagggtccagtagtctagcccagtctactaattacagaactcaaactgcattgaaattgcagtttccatccaatctcacgacccttaacataatcgcaccggcaaagtccctcttgtcatataagggaacgttccaagttcttgagatcaggacctggatgtcttcggggctgttactcagctgatcacagggggttagggtttcagcactgagacagtggctgggtctgccctggcctggtgtggcctgtggccagtgatgagttttcctcctgtgagcagcttttgagggacctccataaaccaaaaccaaaatcctaagccccttaaccatccaaatggactccttctctcggcaagggcattccaaagttaacctgaaaatgagttcaggatatgatgggaagggggagctggacatgccttgttataacctcctcgcttttggaattactgttagaacggactctttcagtctgataagaaacatttacactatattctctctgaagccagctacctggaggcttcatctgcataataaaaccttggtttccaaaactccttattttgttgtttttttgttttttttttttttttgagatagggtttctcttttgttgcccaggctggagtataatggggtgatctcggctcactgcaacctccgcctcctgggttcaagcaattctcctgcctcagcttcccaagtagctgggattacaggcgtgcgccaccactcccggctaattttgtatatacattttttgagatggagtttcactcttgtcgcccaggctggagtgcagtggcatgatcttggctcactgcaacttccgtctcctgggttcaagtgattctcctgcctcagcctcccaagtagctgggattataggcactcgccaccacgcctagctaattttttatttttagtagagacggggtttcactatgttggccaggctggtctcaaactcctaacctcaggtgatccacctgcctcggcctcccaaagtgctgggattgcagatgtgagccaccgtgcccagcctaattttgtatttttggtagagacagggtttcaccatgttggtcaggctggtctcgaactcctggcctcaagtgatctgcctgccttgacctcccaaagtgctgggattacaggcatgagccaccgcgcctggcccaagcctccagtttccgatggcccctcgttccaggccccagcgtctgcctcatttggggtgctgcattcttcaagggtcctctcagtcaagtcccatttgtggggtcctctctggtctcccggaatcagggcagatttaccctccaacaaagctttgctgcttacctcactgcactccttgagctcactgtacagtaggcagcccaggctcccagctctggcccgagccaccttgggcaggaatccttcgggttgaggccatgcggcgaaggagttgtaggcatggtttggccctcaggcctgcctgggtttgaaccccagccctgccacctaccaactattggtcacttacctctttgtaaaggacttggcagagaataaatacttctaaaacacataaaaataaacccggcatctgtcccaccgccccaggggacacccattcagcttcataaggggaagtcctcctcccctcatatggctagaagcacctcagaactgaggcgggggccgatcccaacccctccattgcatcattctgaggctttgaaacctcaactgcaacagagccggaaagaggggccttataacatcctgtcacccttggggtcgggggcagccagaaggcaggggtctttgagtagagggcagcgtggagaagccctggaatggagctgggtgaggccagggccagctccatcctgcctggttggctcagggactccagagtgggcggcgggcagctgtcatcttctcttcttccctctcaactatttttttttttttttttgagatggagtcttgatgtgtcacccaggctagagtgcaatggtgcgatctcggctcactgcaacttccatctcccaggttcaagcgattcttctattattggccagaaggtcagggtgtgttcatagaatgatgggtccatgtcaaaaggataaggagacagcttgaaggagaccccactggcctaatcaggggcattttaagcatcaaaataaatgtaatagtaatggattataatccactggctaaaatatgaaaccatgagtccatattaatataaatgaaggaagaaaaacttctttacagaaaaaaaacaatgtgacttcacactgattcatccagtgtccatgcaacaccacagggctctgcctggttttccttccacgtctgtgtctcccttctttcccagggagaaccctggttccaaacaatacagctgtgcttgtccatttgtgcgctatcctgcaacacttgcaaaacagtttcagaattgctacaccgataacactgctcataacaaacccactaaggaaaggtagagatttatttacaattctcttttttttttttttttttttttgagaaggagactcgctctgtcacccaggctggagtgcaatggcgcaatctcaggcaggaggatcgcttgagtccaggaattcaagaccagccttggtaacatggtgaaaacccatctctactaaaaatacaaataattagccagacatggtggtgggcacctgtagtccgagctactctggaggctgaggtgggaggattgcttggagcctggatggatccttggctcactgcagcctctgcctcccgggttcaagcgattcttgtgcctcagccttcccagtagctgggattacaggcacatgccaccatgccaggctaattttttgtatttttattagagatgaggcttcaccatgttggccaggctgatctcgaactcctgacctccagtgatccgcccatcttggcctctcaaagtgctgggattataggcatgagccatcgcgaccgacctacaagtcttgttgaccttaggatttaagtcccacctaaggtgcccagtgtctaaaccagaagaggtaccttctgagctggtctttgatggatgaataggagtctcctgggagcagaaagaggagaacaccaggcagaggaaccacgtgtgcaaaagtctggggttgaaatgagagtttggtgtggccccttgctgtggctgaagccctgggtttgtttagagtgaaggggatgacaaaggatgagaatgggggctgtttgtaggggcaggtggaggtggtggattgcaagggccttgaatgccaggtgaggagcttgggattgaaggagcaggaggcagggcatcacaagaggcatcagggtttaggaaaagatggagagtcattggcagattggtgaagggaggccagcatctggtgccatgagactcagtgcctgagccagcaggacagctttggcacttctcctccaggcacctcacttttacggatgataaaacatgggcacaagggggccccactcccagagcttcagggagactccccaagggccattcctggcacctggggtctgaggtagggacagagctggctcacaagccctccctgctctgtgacatgtctgtttcctgtttctcccccatcaggagcagtttcagtctcaacttcaaaagaacaaacgcgcactcaaaacaaaggaagaccgtcctcgactgcagaggaagcaggaagctgtcggcccagctctgagcccagctgctggagccccgagcagcggcatggagtccgtggccctgtacagctttcaggctacagagagcgacgagctggccttcaacaagggagacacactcaaggtaggggggctggagcctgctgagttggccccacacggggtgggggtggatttaggaaccagggacctgggactgtcccaagcagactgtggcccctggaagacaggcccagcctctccagttattggctgtgtgactctggacaagccaccttttccctcggagcctcagattctccatctaggaaatggggagataactaatgaccctcctttggggctgttgtgaggattcgatgagatattaccacagtgtctggcaggagttagttcaacccccagttttccaggaaaaagtttgaaaagaaaattgttgagagagggagagaatgagagctagagagagagacagagtatgggaatggagaacagagcgagaaagagggagagagagaaggtcttaggaaagaaataagtacacatgctaacctagtagggctaaaatagctaagatgaaagtgtcaaggatgagcttcccagtagtgtggagaaaagggaaaatagagtcataccaccgttcatttctccttgtctgggccgcttttgacagatgttgcagccttccaagacggtctagacagttgggcctgtggaatgtgtctctggaaatgtccttgcttaaaagtttgcatatgaaagccatgcccaggattctgggagtggccatgccaagacgtgtgcactggaactgccagtaaaccacactagggaagtgactgcccttccctgggcctcagtttccccactggagcaatgggtgttagactggatgctcctctgcgctgagccctgggcgctgcccttggccacaagcttcaagcacaagacgggagagctccctgtgccatcaccctgctatagccaggccccgaactcagcagcacacctcatgtaccatttaagcaatggggactggcacccccatttcacaggtgactaaactgaggcacagggaggcaacatgacctgctcggtatggagtcagttttgaacccgtgtccctttggctgtggaacttgcgcttggtctgaacaggctgggctgggggttggggtccagaggaggaggagcaattcctccttctctatgctggggtgctggtgctggcacctggggtcactgcagtgctggctgtcggcctcgtggacatgtggccagatggggacagggccaggctgagcactggggctgtgagcccaaggcatgaccctctgcggggatccaagtcttggtttctcatctgagagcacttcgaggtctctagacccaagtgtggtgttgggagggagtggggcagtgatgaaataggaatggggtgcgcgggaggcgttgagccaggcttggagggatcaagtggctggggtggaagctgagctccgcgaccatcctgtcctctcgtctagcaagtattttccagtgctccctgtgggccagcccctgccatggcactgcctgcctacagattgagtccagcctgggagagtgggcgatgaagcccgttcttgaaatctgaactttggtcttggatgaaaactctggctcatggactcaccctggacaaatggccccaaacatcacctccctgggacaaagcctccctccctgataggccaggcgtttctgggtgcacgcacccccatgctgttgccagctggaggggcatgtggttagtggcttcactcccatctctgcacgagcagcctggatgatgagacccagactcaggaagcccatgtcaccttgacatctccatgggaaagggcgacggtccagacccaacacagccagccctgggctccctgaacctactttctgctgcctgtcattgtcttgtcggcaactctggcaaaacctacccgaagcccctcctccagcccaggcctccattgtcacttacctgggcttgcgtggtggctcccaaggcctccccgcaacaatccctgctccccagcccagtctccatgcagtggccatgactcagagcctggtcctcccccgtacatcttatgacatctgctcctccctccctcagctccagacaccctggcctcctttctgtttcagggacagagcttggccccacctcagagccttggcactggctgttccgtccgtcttggacactgttccccacattttcttaccgctggttccttcttgtaattcgggtctcagcttccatgtcacttcttcagagaggcctttctggaccaccccacctgtcccgtgttgacaatctccctgctcccacccaaccagacattctccatctgtcacctgatgtccatttttcacagcgcttactgctccattaaactaccttgcttatttgtttcttcccttgtttatggtctgtctctgcctactagaatgtgagcttcttgttccctgctctgtcgtggggtgcctggcacacagtaggtgctcagtaaacaactatcaagcagcaactgcatcgggctgggatggtaaagtggggcggcagcctgggtggagggcaccatgtgggcaaaggctcaggggcaggccaagttctgcctctcaccttgagcagtgatactcctccagggaggagttggcctctctcccttgtgagaattcccgggtctcagagggtctggggctttcaaacaatgttcacagtaagaaatcagttaacgtgaggtcaagagatcgagaccagcctggccaacatggtgaaaccccatctctactaaaaatacaaaaatttagctgggcgtggtggcacacacctgtagtcccagctactcgggaggctgaggcaggagaatcgcttgaacccaggaggcagaggttgcagtgagctgagattgcgccactgcactccagcctggtgacagagtgagactccatctcaaaaagaaaaaaaaaaagaaaaaagaaaaagaaattagctaatgtaaccaatgggacattcctgagtcctctgagtgcagatgacaaagagacaaaacgaagcagggactgcatgagacgtattccacccagtgtccgcactgctgcatgcagggcaggccataaatgcacccattggacagacgagggaggacactgaggccaaggccacagagagagtcagaagcagacagaatgttctggagccccaggcttcagggcatcctcctggaatccatggctgtggtatgtggcctacaggccctcattttctccttaggttgggggagttgttttgtttttttgagacggagtctcactctgttgcccaggctggagtgcaatggcgcgatctcggctcactgcagcctccagctcccgggttcaagtgattctcctgcctcagcctcctgagaaagttggggattatgagagtatgccaccatacttggctaatttttttgtatttttagtagagacggggtttcgccatgttggccaggctagtcttgaactcctgacctcaggtggtccaccctcttcagcctcccaaagtgctgggattacaggcgtgaaccactgcgcccggcctgttttgttttgtgttgagcgaaagttttcctgagtcagccacctgcttccgttcacccctgggtctgctgacctggcccaggctgcaggggcaggaaggaagaggctcagccagcctggcctggtggacaaagcgggggtggagatgggggtgcagaggccacctgtgagggtggggcctcaggcctgggccctaggaggccaatcccagctactcttggcaaaatatcactgctggagttgatgcccctgtattggcccgccctgggcctttggtaccccgtgcccaattttttctctcaagtacccctgaaggattgagctgacattggaacctgctccaggactgacaggagagatgtcccctcacaggagagatgtcccctcaagctggagtccagtgacaaagaggactggaggcaaaaattggtgggccaggacccccttgaccagtgagccaaaaactccaggcctcagagtcctgactgaccaaacaggctctgcctctcccctgctgcgtggccttggccaagtcacttcccctgtgggcctcagttttgttatttgtaaaatagcatttggtgatgttgaccttgggggctatatgagaatcagggggacagacggaaggcgtgcccagggaatggaggcaggacccccggcctcatgctgtgcccctcccaggcccggccccgccccccgccttggtcgcttggttgctccccctcagggactcccaccccggctctggctatttcagttcctccgggcccacctgtggtgtgatgggggcctcacaggctcggaagaggagcccgtgtgaccgagcaggccatgccagggctgagaaccagtctgtctcagaccaaaggcccccttatctgctccccagagcctgacgtccccccactgaattgtcacccctgagctgtctaaatgcgagggaccctaggtgaccactggtggctgtgctcaggccgggtcccccgaccttcaccccaaggctcagtgcgtggcatgtaagtgctgtgggccccccaaactcgggggcacaacccaggaaggaactcaggtccccagttctgctcctgcaaaccccatggtccgcagggctcctggtgtcggagcctgagaatccagctccagccaccccaagcctcctacgagtccccgactgtgcctcccttggagtctgtgaatcacctgaggatgggctgtcctggggccaggggatgggcagcactgaggaacgagggcttctaattcagcccttgggaccatgggcaagtcctgtcccaggcccccagccctgctctgtgagtaggcacagaagctggtgcaggcgaggcccacctggggcctggcgtgcagtggggcctccgggggtgacagttgttccttctcggtgactgagtggctttgtgtctcctgcccacagatcctgaacatggaggatgaccagaactggtacaaggccgagctccggggtgtcgagggatttattcccaagaactacatccgcgtcaagccccatccgtgagtggacagccccatcccatccccgtggctctatctctcctggccatgggaccccctcactcctgggcctctgtccatctgtctggggcccccaggctccacagaggccaccagcctgggcaggcataggagactgagttctgaggacttccccagagtggggacagagtcagggcaagcccaggcttccacactgaggacgtgagccactggagaatgtccaggaggtccccgagagaggacaaggccctgggctttcagctggctgcgccactggctgctgtgtggcctcaggcaggtccctgccctctgttcctcagttttcctatctataactcaaggagggcagatgctccaatctgttcagggtggagggttctagagctcttgctgagagctggcccggccctgggttgtggctgggagagggctgggcgggaagcagaccctgtaggccctgcctttggagtctgggggggagttggacattggcagagcagagtctggtaccagggtggagcaagaactgggcctggggcccagctatcctggggcctgggacctaccagcctagggatgtcccaggttgggctctgggcaggtggcagccaacactgctgccctgagaatgactggggcagggcccagcctcagaacaggcatggggcccaagaaatctatgcaaaccaactggatatgctttaaatggcagctgaggcagccccaagatacagccacttagtcattcactaaacactggccacaattccagggggtccagcccgggtgatgctggagacacaaggggtcagagcagctgtgttctgggggagaaagaggacatgaaggacatactacatgggaagacagtgagcattaaggtgatttctcagggaaggcttctcagaagaggtggcaatgagtgaggttttgaaggatgtgtaggagttggttaagtagaaaaagagaaaggcatccctgggagagggtcaggatgagcaaagggagagcaatgagagagaacttgtggcatgtgggactggcaggaggcccccaaatgccaagccatgtggggagccatggaggtgttatggtaggactcagtcagatatggagacaggtgacagggccaagcaggctggcgggacagtttgggagctgagatgtgtgtgtggctgtgcggtgggaagggaaggaggtgcagggccagggtggggcatgagaggtatttcctctttatctctctttaagttagttccaaagctgccaccacctccagcttcctgtgctgggcgaggccccctccgacccaggtcctcagccacctgcccgggctgcaggcactcccagcctcccccacagaggctgcagcttccagtcggcatctggggcggcagcctgggttccaggccccactatgtcccgcgtggttgtgtgacattgggcaggtttctgtgatctttctgtcaattaagggggagagggaggggggtgtgcgaagagggagagagacgagagaatccgacccagggccacaagctggagccagtgccccaggcccctgtaagccaatgggaccatccagacatgccagagggcatgaacgggagcaatccccctgggccaagctgtcagggaggggccttcaggtggaggaaatggcctggcaatggctggaaggctggctggcctacagctgctgagagggtcgcatttgctcaggcaggggagaaaagatgacaaaagaccgcagtgccgggccaggcctgtcgaggggatgccagtggtcgaggcaagactctagcagggcagttgggagccatggagggtttcagcctcccatgcctctggggtcatctctggccatttgtgtctgggacacagcagggatggggtcaagcccccgagtaacctgcctgaagtgatgcccaggtgtgtcctcgactaacctcagcacctgccttgctccccaaaataactatggggaaactccagctccatacctgacttagcccataaaggcctcaggtgtggggtcagagggagggctggggcctcagaaattcagaggtaggcctcgtgcctatgccaggcccactccttccctgggcaccccctctcacccctgccaaccccaggagcccccgggggaggcacaatgtacgccaagtgctccagagccagccccatcagcaggggccacagcggcaagtgacccagcctcacggcccatgggagtcagggatggcttcctagaggaagggtgtggcccgctgggcctggaagttcaagtagatgtctgccagggaaggcagagacaagcctggcagggggatgtgtggggggagcagcaaacacccgcgtacgagcagctcatgcatcctcccaaggccctgagagctgagcaccaccatcgccatctttgagattagcagacagaggcacagagaggttgagtgcccccccaggatctcacagctggcacgaggtggagcgggactgcagccgtgtggcatggccctgggctgggacaccctggaggacagcggggaagctcataagaacagctgtgggactgggagagtcccaggccatgcacttgctatgcaatctggtggggtgtgggggcgtctctgcccctatctgggcctcggtttccacatcagtaaaacaggaatgatgcgagatggccacaaatggagtgacactggtgtgggggaaggagccgggccctggagtttcaggaagtgctttcttcttgcctccatccgtcaagccatggtgggggcagggctggcaggggacgtgggaactcctgggagggtgtgattgcgatgctctctgagggcaacagccacccacacactgatgccgcctgaggagttttgtgggttcttcgaagaaacctgccccctcaggaaactcccgccctgggccacgctgggcactgttgcgggacggagctgggggcttcctggtggagaagctctctgcagctcccctgcctggtaaccccaaccctgggccccctacgctcccctcctgctgcagcctgtggcattcacctctggccttgagacacccaggctggctgggcacctgccttcaggtctccaaaccccagaagacccaggctgagctctccggatggttgccctgagccctatacccagcggctaccttccccacgtcccctcccagaaggaaactcgctgggacaggggccgaggggcccccattcgtttgggggcagcagtggtctagaatctcatgtctaggagttcgggtttctccggaagccgtccctgagacacgagcctgataacaaggaatttatataacagtggagaagaggacagggaagtgggggagccagtggggcaaactgttggcgtcatcgctgctgggggtaaccggagctccatctggctggggaccagggccagctggagacagtacagaatgcgcacctaggagtcatgcctccggaaggccaggcgctggggcgtctacccctctgctccatcagtcaccactgggagtcagactgttcctgggagcctcagcctgccctgaacccaggccaaatatgtcaatcaccagaaaaaaggccccgaggtctgtactgagcagccttcatcctgccaaggccggcgccgggacatggccaggacactagcggcatgtgcagcaccgcacgccttctgcactcagccccgagggctcatcaacatccgaaacaacaggaaaagccccgcctggcttccaccacctgtgccgagctcagtctgactcagggagaggagcatttatggaaggagtgaaggggaacattctgtcatggtgccaccacgagacctgtggctgctctgggcctcagtttccccatccgaacaataaaggggtcagagccaaagctgggctaaaacactggagttaggaaagccagtcagagaccacacagcccctccgatggtgggtgttctagtcctgcaggctgctgtcacggaatgccatccactgggtagcttatgaacaacagacatttgttgctcactgttctggagtctgaagttcaagatcaaggtgccggcaaattcacgtctgatgaggctacttcctggttcacagacggctgtgtcttttagctgtgtcctcacatggcagagagacaagtgagctctctggggtctctttcataagggcaccaatcccattcatggggactgctaatcacctcccaatgaccccaccttttactgctgtcacatgggggattaggtttcaatatttgaattttgggggacagaaagtcagcctatagcagtggcaaattcctgaagaggccgggggctaccaggagctaccaggagccacacagcaagataagcaggactggaaaaggagtttcactcccagaccctggggatcttgcaagagtctaagcatttaccaggcaacttctgcatacccagttctgtttggtcagcagcaaaaggaacttgtgcctgtgaaaaaaattcaggtggcctgagactgtggaatggatatttcctcaccatatcaaagctactattatttttgtcatgtttttatattttcgacttaagaagtttttttttttttgccgggtgcggtggctcacgcctgtaatcccagtactttgggaggctgcggtgggcggatcacgaggtcaggagatcaaaaccatcctggctaacatggtgaaaccctgtctctactaaaaatacaaaaaaatatgtatatatgtatattagccggggcggtggcacacacctgtagtcccagctactcgggaggctgagacaggagaatcacttgaacccaggaggcggaggttgcagtgagctgagatcatgccaccgcactccaacctggacggcagaacaagactctattttttaaaaaaagtgtttgtttgtttgtttttgagacggagtcttgctctgtcacccaggctggaggacagtggtgcgatctcggctcactgcaagcaccgcctcctgggttcatgccattctcctgcctcagcctccccagcagctgggactacaggtgcatgccgccacgctcggctaatttttttgtatttttagtagagatggggtttcaccgtgttagccaggatggtcttgatcttctgacctcgtgatcctcccgcctcggcctcctaaagtgctgggattacaggcgggagccaccgcacccggccagaagtatttttttaaggaatgggggtgggaggttctctattccccaggctggtctcaaagtcttggcctcaagtgatcctcccatctcagcctcccgagtagctgaactacggtcacgcaccaccgagcctgatttattttttgactttaaagaatctaccatctcaaagggaaagttagactgaggttggctggggtgtggctcactggagtgtgacttttctgtttccataagggtatgtgtttgctggcatggtaggagaggctggcctcaggagctaaaatgctgggattgtgttccagctcctgcctgcctctgctgtgtgattgtgggtgtattgcttcacctctctgtgcctcagttttcccatctgtaaaatgggtgcaatcacatctcccttgtctcagaccttgaacacctggcacggggtgggaggctggctgagagcctggtctcacactgccttcaccggctccctctctccgcaggtggtactcgggcaggatttcccggcagctggccgaagagattctgatgaagcggaaccatctgggagccttcctgatccgggagagtgagagctccccaggggagttctctgtgtctgtgaagtgagctctggcccttgggggtgtgtgcagaggagggtgggcggggttgggcagcatttgagctgagccttggggcccgggacgggctcacggagtgagggtggaggaatggcatccctgcagagggagcagtccgggcagaggccttccggacacaggcggtggtctgggcaccccagggtgcagcccagagcagtggggtgtgttgggaaagcaggatcaggccagctgtgcaaggcctcaatgccaggctgaaggtccaggcttctacgagtataggagccatcataggttcttcatcaggagagggcgatgtccagggtggtgatgtggcaagagattgagggcaggagagtgctgaaacgcccagggcgggtgtccaggatgtgctccgcacagggtcccactctatgtgatatagttgggaagatgcaccctgaggccaggctgcctgggctcaaatgctagttctgccacttcctggctgtgtgagcttgggcaagtcacttaccttctctgtgcctgtttcttcacatgtaaaataggctattgcacggaagaaacaagttggtatatttaaagcaattagaatagtccctggcatggaggcagggtggccgtgctggggaacatctggcattgtattagggcggccctcagctgtggtgtggcagcctctgggcagcacagaatccaatcctaaagggccaccctggagtgattgaggaatccaggctggaaagtagcagcaggaatgggggtgggggtagacagggtcaggctcctagttagtctctgtccttcctactcttaggccttggtagaatctagatgcattaattcaaggaatatttattgattaggtgccatgtgccaggatgctctaggggctggggaaaccaaatgggaaaaaaaacaaagttgctgctgtcgtgggtttcagtctttgtgagtgaacaagaaaacatgttaatacagaatgaaccaaggtggtcaggaaagggctctctgaggaggtggccttgcagcaaagatctgaactaggaggtggaggcttcccaggtgcccaggaatgaggaggacctgggaagagaggcttctaggcagagggaatagcatttgcaaagaccctgaggtgggaatgtgattggggcatgtaggagcccggaggaggtgacgtggctggagcagagtgagcgaagggcaggggctggagttccacccacatccagtgatcacagagggcctgaaaggaggtcgggttttctctcagagcaatagggagccatggagggtcttgagcaggggagagatgtaattggactccatttttagcagatgactctgagtgctgtgaggagaaagaactgttgggggagagcgtggtggcagggaggcccgtggggagtcaggagggagatgatggcctctgggactgtacgggtaggggctgatgaggggacacagagaaatggttgggcccaggcatggaggtgtgcggggggaccaccagcagtaccagctctcagggctgctgtgggcacagagcccggaatggaggaggcgcttaccatgccagctcttactgccaccagcggagctagcactggggtggtaaagagtccagccgggaggaagggatgaaggaaggggtggccccagaggagggcagagtggcctctcatgatctcctaaaggatgaaggccaggtgtggtggctcacgcctgtaatcccagcagttcgggaggccaaggcgggtggatcacttgaggtcaggagtttgagaccagcctggccaacatgctgaaaccccgtctctactaaaaatacaaaaatcagccaggcatggtggcgcacgcctgtaatctcagctactcgggaggttgagacatgagaatcatttgaacccgggaggcagaggctgcagtgagccgagattgtgccactgcactccagcctgggtgatggagtaagactctgtctcaaaaaataaaaataaaaataaaaataaaggacaaagaaatacaggcctgggtcgatagctaacactggggctgggtgtggagatgcaagcttgatggggcttggagtcagggggtcccaaagaagcagacaaaggcagactcagacaggctgggccaggagcccatgagggctcctgctgggggaaaagcattcccacccacctgatgccttccaggctctgccgggtccctgtgactcccatgtgttcagccggcctgttttgaaacaagctcaagctgttcactgtgtgggatcagcacgtctgctgctagccctgcagggtggcgagctcccctgagcctggaggcacccgcaaggaataggagcctatggtcaggaaggcggctctaggggtgtgttcgtccatttagtgttgtgataaaggaacacgtgaggctgggtaatttataaagaaaaggcgtttatttgacttggtgttctacaggctgtgtaggaagcatggcaccggcatgtgcctctggtgaggcctcaggaagcttttacgcatggtaaacggggaaggggatccggcgcatcacatggcgagacgggggcaagtcggggagggaggtgccaggctcttttcaacaaccagacctcagtcattactgcaaagagccactgatgagggtctgtcccatgacccaaacaccccccaccaggccccacttctaacactgggagtcacgtttcagtgagagattcggagaggacaaacatccaaaccataccagggaggcagatccaacgtctcaggggtcacagccccccacattcaccctgagcccgggcgcccagttggtggaaccagccatcagccttgttcccttcccttttctcctgggggcaggctggtgatcctgaggggcaggaacgcgcatgccccctctgagcctctatttccccatcttaaaaatgcgagtgctgtcagcatgtgcgtgtgtgcgcttgtgtgtgctgggggtttactgtgcgttcttggccctgactgcccacccccgggatggtgtgggcacctggagcctggagtccccgcgggctcaccccccacccccccagcccagccaccacttccctgcagccccggggagctgcggctcctgcggaggcaggacgtggcagtcttccaagtgtcggctgtccagggcctggtcatctcctgggaatggcgtccgccaggcgggctggcctggctgagtggctcctggaaccaaccccaaagcccaaggtcacccagcaaagtgggggcacaggggactcaaactacgtctggagcccgagttgagggggaggggctggccctccctccgccctccggcttcctcctctaacaaatcacgcggcctcactctccaagttagcgccccagtgtgctgccctcttcaggcgtctctctgtaagtgcagccacctgcgcacacgcacatgatcagacctgaacaccccagccttgtgagtttgctcagcacgcatttattgagcatcagctgtgtgaaaaccacaaggcaggactgaaacaggagacaaaccagaggcatgtgaaggggaaatggtcacagcctggcccaggggtctctatgatgagcaaatgaataaatgaaattcaatgacagtggatacattccacatagtgaaggcaccagggaggaagtgacatctgagttgggctctaaagcatgagtaggattttggcgcacaaggagagtagatgatatgccaggcacagggaacagcatgagtagagatctagaggtggggaagcgaggggtgtgtttggataacaacgtgttttctgaccaggagggaagatggacagtcttagggagcagttcttgagcaggcgagccagcaccggtgtttcctgggaagggatctggaagcgaccctcagagaaatcctggcctgtgcccccgaaccttttgtccaaggcatactggccaagtgtgcccaggtcaaaactgtcaggagcttcctgggcttggctggctgtgggttgtacacagcaccagcaggtggagccattgacccttggcttcttcctgcctgggcccaggctcctgggtcctgctcccattctgtccatcatctgtcatggggcctctcagtggtccttggacaaccaccaagcaggggtcagagttggaagctgagactcaaatggggcatgtggctaagagcatggtattttgagcaacagtcagctctgacacctgctagctgctcgctgtataatcctgggcaagttacccctctgagcctcagtttcctcatttataaaatggacagctatgtaacgtgttttttatgatgactggcacatgataagtgccagttatcataattatattaaggctccaaggactgcacaccaagctggggaggaattagggagcccctcctggcctggaaggctgccccccaccccctgcccatgaatccagcactcttagagaagaggcagcagcacagggagtcagggaacccagatgctgggaagccgggtgacctgatggccacctcggaaaatgacagcctggcagatttgtgtgtaagagctcttccacccttgctggttggtacttgggaactctgatggcactatgcatggcatctctggcatactcacaccaagccctgtaaagctgtcagaggtggggtttatgggcctcatgctgcctcctagagcaactgtggccatagctagctgccctttatgagtttacaaagggctgtccccctcctcctccagggagcatgtctgagctggcgggcagcgggccaggggccaaggctggcgtgcaatgtctgggctgcctaacttttgccccacactcctatccaagctactgtggactcttctgccataaatgacagtttgtctccaagtgacatatttgcctcctttctagccagaggtaccctggagtcaatgcacatgtgtttgccctgcccatctggtcactgaacccctgctgtgtgccagccctgtcccagggcctggggattcagccagcaacaaaatagggcaaagctctctgtccctcaagtgcccatgtgctactgggtgacagacaataagtgattaggaaattgtataaaatcttacacaatgaccaaggctttggagaaaatgaagcagggaagtggtggagggggggtgcaattttaggaggaagggactggctgcaggcaaggacagggaggaagtgaggagacctgcctgatccccagaagcccagcttgcaggtaaggaaactgaagcctggagaggtgcagcaacttccccaaggtcacacagcgaggaacttagagctggtgcccaccgacctctgtgccctgacagacctggtctgtcctccacccaccctccctgagctccaaagacccagcaggagtctgtctgcaccagtgtcctgcccctcccaagctcagcttgactctggttcctgtctgctgccgaacaggttgttccacccctccttttcacagatgggcaaactgaggccagagaggggccatgcctgatggagatcgcccagcgggcagttagcacccaggtgggtccacacgtccacaagccctggttggggtggtggagggggtgtcctagggctcctgcccccaccccagccttgtttttcctctctgggctgacactgttacctttgctgctgctgctgctgctgctgctgctgccgccaccaggccagaaaaactcgctgggcaggactggctgctgccagcattaggcctgacttggtccttggggcttttctgacagcccaggggtcagcctagccccttgttcccctgggtaggtggatgtaggggtcacacagagagacaaagatactcatgattgctcagtgagagactcacacataacagtcactccacacagtgggagacacacacagacacacacacacacaagcatcccaggaatgcacactcagacacaatggagacgctctcacacccccggcactgcccactgaagtgaatggctccagcagcctctcctctcaccaactcaggcccacaatcccagtgccccctccctcctctggctctgggaggctcatgcagcagagccggctgcactggatccagccctcccggttccggggccatctggactcagattcagttcctcctgcaagccctgaagttcccacaggccttgggaaggggagtggagatgaggtctggagaggccccagagggtagccccagtctgggggattctcaaatgctttgaggctccacctgggccttgaaggatggctaaggtcaagactagacagagaaaagggaaaaggcattatttctggtgagggccatgagcaagagcccagccaggctagggaaaagggccaggctgggagagggagtgacagctgggatgctgggctgtgagatgacagagacagcaccgcttggcctcaggcaggggctggctcagcaggaggggctgcacccaagcctcactgtcctctgctgtaaagcaggacatttggaccaggtgggagaaggggcaagatttgccatttactgagcacctagtatgtgccacacacagactaggtaggggctggcacatgcacgtttcccagatttgagaattctccagttcccaggttggaaagccctagaatccctgggtccctggctccctttcccttatctcctgttctccactccctgactctactatatgatcaaagaactgctccagataacgttctatctgctctagataactttccaagtatctaaagatgaacttcaaataccataaaattcaaagttgtggtcgtttgggtttgaaatcattttcaaacccaccacaccctttctgtcccctcacccagaggagtggggccacctgtatgcaggcccctcctcggggccaacagggagtcagggccttctgcctgggtacccggtgccccagaggtggagccactgggatccctgtctccaggcttctcgcctgcccagctgtgggtcaccgtcactccactgcttgaagcagtgctcctccccaggcaccacggccaaagttcagtaaaccctgggctggttagcacgtggcactagggagtcatggggctcagaggctgcctctcggaagcctctgggaggcttcggaaggccagacagggcaggagacacacatctgcctgcacacccacctccgcgtcacgagcacatgaactagctctctttctggctgtgtgaccctgagggctggatgcatcttagagcaatgggttggccaccggagcctgggttcagggtcagaacacctggtgggctgcaatcccagttcagaaccaacagaagtgggtttcaagaacaaagcatcgcaatgaggacctaagacctggaaagtgatgctctgtttgctgagtcccagctagactggaccttcagggcccactcctgcctccctgcctttttagtgtctcatatgcaagtcattttgagtagcaagttacaagaaggctatgagaggggctgagggatccaagaaggccctgactgcgtgatggggtctgatgcagctctcacaggatgcgccattttacctgggccttgaggcatgagtaggagttcaagaaaaattccttccagttggaggaaatactgtgtgcaaatgcctggaggtgtatttagaagtggtttggggctgggcgccgttgctcacacctgtaatcccagcactttgggaggccgaggtgggcagatcacccaaggtcaggagtttgagaccagccaggccaacatggtgaaaccctgtctctactaaaaatacaaaaattagctaggcgttgtggcaggtgcctgtaatcccagctactaaaaatacaaaaattagctaggcgttgtggcaggtgcctgtaatcccagctactcagaaggcttagatgagataatcgcttgaacccaggaggcggaggctgcagtgaaccgagatcgcaccattgcactccagcctgggtgacagggcgagactccgtctcaaaaaaaaaaaaaagggagaagtggtttggaccccttgactgtaatggagtagggggaatcccattttgccctacgcctcatacagaccagagggtgggaaacttgaacacatctttatcttaaatctttcatcttaaaacatcaataaggaaggaagccaccccagggatgactggtggagaaactcaaccacaggcagggataggacagatggagcagcagatctgggcagctggggtgacagacaccaccctcttgttcaggagaaccatagacctgaaggaactcaggctgtgggtgaacccaagcttgcaaatgtattgcgaccaaattgtttaaccagatttcaatttacaacccaggagaggtaggggtgtgtgtgtgtgtgtgtgtgtgtgtgtgtgtgtgcgcgcgcgcgcgcgtgcatgtgtcccatcaaggcatcaagtgctttggactggtggttggatctcatttagcccaaatgtgaacaaaaagatccctagcctgtggctcaggaggctgaggggctatctacctcccagtggtcatcctgtgcccctaccctgcctcacccggctcacagggccccaggctttcccagctattagctccgccagccacctgaacaggtgccctccctcggggtcctaaactgtcttctttctggttgggagctgggactgttctgtgttctccccacagcccctagcccagccaggtgggcctagggtggctctgttggcagcacccacacagcccccagggtcccaggcctctcagctcccttgcaaggagtgcactatcgcccacatttggcaggccaggacgcagaggcccagagaggtgggctggggtctaagtccaggcaggctggctatagagctgggaagggtagctaaggtttggccaggcagagaggatgaggcagggagggagggcctcctggggggcacagcccaggtagcaacatggcaaagtagaaatggacttggaatgatgagctctggaacaatagtaatagcataattggaataattattattgctattgttatgtgataataaccaatcaggagggcattaggcaacgttttacatgtatgagctcaaatgtggccccagctctgacctttcttgctgttgtggctctgggcaggtcgcggctgcactcggggcctcagtttccccactggggcatgaggatttcaagaaaaattccctctagctggaggacactctgtgtgcaaatgcctggaggtgtgtttagaagtggtttggaccccttgactggaatggagtagggggaatcctgttttgccctatgcctcatacagatcagagggtgggaaccttgaacacatcttttttttttttttagagacagagtcttgctctgtcgcccaggctggagtgcagtggcgcgattttggctcactgcaacctccacctcctgggttcatgccattctcccgcctcagcctctggagtagctgggactacaggcacccgccaccacgtctggctaatttttttttgttttttagtagagatggggtttagccaggatggtctcgatctcctgacctcttgatccgcccgcctcggcctcccaaagtgctggaattacaggcatgagccaccgcgcccggccttgaacacatctttatctgaaatctttcatcttaaaacatcaataaagcagcaagctgccccagggatgactggtggagaaactgaaacatagggcccaatttgctcctcctgggccgtgaggcaggccagccacccccgaagcacagcggggcagcgctgcagtcatgtctgccatgatcttgacccacagctgcaccgcctccagtcccagccccacaaggcctgtcctgggtggacacgccgagtgtgagaggttccagttagttcctctgcccagtcccagccaggacaggctctgcctctggccagtttgaaagagcaggctcggctgggtgcggtggctcacgcctgtaatcccagcactttgggaggctgaggcgggtggatcacgaggtcaggagttcgagaccatcctggctaacacggtgaaaccccgtctctactaaaaatacaaaaaaaattagccgggcgcggtggtgggcgcctgtagtcccagctactcgggaggctgaggcaggagaatggcgtgaacctgggaggcggagcttgcagtgagccgagatagcgccattgcactctagcctgggtgacagagcgagaccacgcctcaaaaaaaaaaaaaaaaagaaaagaaaaaagaaagagcaggctctctcctccgctgggctagaaggtacttggggcgatttggcgatagtgggctggctggaaggctgggcacagacgggaaatgagagagaaaaatccgtggctgggcgcagtggctcacgcctataatcccagcactttgggaggccgaggagggtggatcacaaggtcaggagtttgagaccatcctggccaagatggtgaaaccccgtctctactaaaaataccaaaaaattagccgggcgtggtggcgggcacctgtaatcccagctactcaggaggctgaggcagagaattgcttgaacctgggaggcagaggttgcagtgagctgagatcgtgccactgcactccagcctgggcaacagagcaagactctgtctcaaaaaaaaaaaaaaaaaaaaaaaaaaaagatagcatccactcaatatctagtctctgatcttatggcacatttctgttccattaatctttaggctttttcccaaagtggtgaagattccaaacaaaatgggccatttagaaaacgttttcaggctggtcaccgtggcttacgcctataatcccagcactttgggaggccgaggtggctggatcacaaggtcaggagttcgagaccagcctggccaacattatgaaaacctgtctctactaaagacgcaaaaaattacctgggcatggtggtgcatgcctgtaatcccagctactcgggaggctgaagcaagagaatcacttgaacctgggaggcagaagttgcagtgagctgagatcacaccattgcactctagcctgggtgacagggtgagactctttctcaaaagaaaagaaaatgtttttggctgggcacagtggctcatgcctgtaatcccaatcccagcactttgggaggccgaccgaggtgggtggatcacttgaggtcaggagtttgagaccagcctggccaacatggggaaaccccgtctctactaaaaatacaaaaattagccaggcgtggtggtgcacacctgtaatcccagctactcgggaggctgaggcaggagaatcccatgaacccgggaggcagaggttgcagtaagccaagatcacgccactgcactccagcctggacaacagagcaagactccgtctcaaaaaaaaaaaaaaagttttcttcagattgtcaaattctgacttgaaacagttatcataagctgagcctggtggttcacacctgtaatcccagcactttgggagactgaggtgggagaatcgcttgggtccagtagcgagaccttgtctcaaaaacaaatcaaacaaacaaaacacaaaaacacaaccacaaaaagcaaacaacacccccctcccacccaaagaaaaagaaatggtaactacctggacaaaacatttcacgtgcattgttttagtaaacagacacaaccttggcttcaggtcttttttgttttctgtcacccaggctggagtgcagtggtgagatctcggctcactgcaacctccacctcccaggttcaagtgattctcctgcctcagcctccagagtagctggaattacaggtgcaggccaccatgcccggctaacttttgtatttttagtagagacacagttttaccatgttggccaggctggtcttgaactcctggcctcaagtgatctgcctgactcagcctcccaaagtgctaagattacaggcatgagccacggcacccggtcttggcttgttttcttgacagatcgttgcaacagggtaggacaggcacacttatcactgtttaacagatgagcaaagtaaactgaggtgcagagaggggcaatagctggtggcccagctgataggctgagattttcacatgtcagtcagagccagggaccaacatctatccactattctctgctgtcctctctcagagcgccccttctttggaaatgtgcatagcacctttctacaagagactcttagtgtgttctgagaaagccgtagctcctcacctgcctcagaagggcacggtgcttgcttcttcagaaaatttacagacaagtttcacacacttaaaactttcagcttggcttgagagttaaaacataaccactccaaactgtaatacaaagaagtctgctcaaaagagtagcatttgaccagcctgggcaacatagggaaaccccatctctacaaaaaaaaaaaaaaaagtacaaaaattagccagacgtggtggcacatgcctgtaatctcagctactcaggaggctaaggcaggagaattgcttgaacccaggaggcggagtttgcagtgagctgacatcgcatcactgcactccagcctgggtgacagagcaatactccatctcgaagaaaaagaaaaaaaaaaaaaatacatgcacagaaaaaaagttcaatcagtgcataaggacatatgcaacaagtctccctcctactgtttctcctgatctgcaggtcccctccctaatggcaatcactgttacagtgtaacagagattctgacataatcttattgtatgtatttccttcacccccacgcatggaaacagtaactccctccacacactacctcatgcttatatcattaacagtgtaactcttggagattgttgcacacccaccaaaagagaactgccttattctgtttgtttgtttgtttgttttgagacggagtctctgtcgctcaggctggagtgcagtggcacgatctcggctcactgcaacctacgcctcccaggttcaagcaattctcctgcctcaggctcccgagcagctggcattacaggcatgcaccaccatgcccagctaattcttttgtatttttagtagagactgggtttcaccatattggccaggctggtcttgaactcttgacctcaggtgatccacccgcctcggcctcccaaagtgctaggattacaggcgtcagccaccacgcccaggctcttttttttttttttttttttgagtcagagtcttgctctgttgcccaggctggagtgcagtggcacaatctcagctcactgcaacctccgtgttccaggttcaaatgattgtcctgcctcagcctcccgagtagctgggactacaggcatgcaccaccatgcccagataacgtttgtatttttaggagagatgcggtttcaccatgttgaccaggctggtcttgaactcctgacctcaggtgacccactgcacccggcccaaatttttttttttctcagacggagtctcactctgttgcctaggctggagtgcagtggtgtgatcttggctcactgcaacctctacctcccaggttcagcgattctcctgcctcagcctcccgagtagctgggattacaggcatgtgccgccatgcccagctacttttttgtatttttagtggagatggggtttcaccgtgttggccaggctggtctcaaactcctgacctcaagtgatccacccaccttggcctcccaaagtgctgggattacaggcgtgagccaccactcccggcccctgatttttgtatttttagtagagatggggtttcgccacattggccaggctggtctcgaacttctgacctcaggtgatccacccacctcggtctcccaaagtgctgggattacaggcgtgagcccctgtacccaacctcattcttaaagccttcctatatttaaccagtccccagcagatgacgtacattataccctgcattctgtttctcatacatgttcttgcgcaaatttaactgcagggtaagtttctagaagggaaattccatagtctagactaaaggttactggtaggccaggtatctcaacctatatttggttctcagatccaaaggtaggatttacagaacaaaactgcttcatgttcagtggggtttcacatgccagctgcaggtgagagctctggggatttgcatgctgtcagccaacaccctagccacctggagaggtcctctgttgaattaactgcccagcatctgtccaccctgtggaccacccacagcagtgttgccttcaaaaacttgcctgctggtcgggcacagtagctcatgcctgtaatcccagcactttgggaggccgaggcaggcggatcacatgagatcaggagttcaagactagcctggccaacatggtgaaaccctgtctctactaaaaatacaaaaattagcggggcatggtggtacacgcctgtagtcccagctacttgggaggctgaggcaggagaatcccttgaacgtgggaggcagaggttgcagtgcaccgagatgacgccactgtactccagcctgggtgacagagcgagaatccacctcaaaaaacaaacaggccgggcgcggtggctcacgcctgtaatcccagaactttgggaggccgaggcaggtggatcacgaggtcagatcgagaccatcctggctaacacagtgaaaccccgtctctataaaaatacaaaaaatcagccgggtgtggtggcgggcgcctgtagtcccagctactcgggaggctaaggcaggagaatggcatgaacccgggaggcggagtttgcagtgagccaagatcgcgccactgcactccagcctgggcgatagagcgagactccgtctcaaaaacaaacaaacaaacaaacaaacaaaaaacttgcctgttaattctcatttctgagatcctgcagctaccttgggtggtggcctgtccaagcctggcctttgttttgttttgtttatttgttttgagacagtcttgttctgttacccaggctggagtgcagcggcgtgatcatggctcactgcagcctcaaactcctgggctcaagcgatcctcccacctcagcctcccaagtctttgggattataggcgtgagccaccgtgctggcttgcctttggttctctgaactactccagttctttccactaaatccacccccctcttttttcccctttggttaatcagaatccatatcttttgctccagatcaaagaaccctacccgatgatcccttctccattcacaaaatcaataacatactcaaaatcaataaacagctgaccgagcacagtggctcacgcctgtaatcccagcactttcggaggcagaggtgggcggatcacaaggtcaggagttcgagtccagactgaccaacatggtgaaaccccgtctctacttaaaaaatacaaaaattagctgggcgtggtggtgtgcacctgtaatcccagctacttgggaggctgaggcaggagaatggcttgaacccgggagcccgagattgcagtgagctgatatcatgccactgtactccagcctgggtgacagaacgagactccatctcaaaaaaaaaaaaaaaaaaaaaaaaaaagaatgtggccgggcgcggtggctcacgcctgtaatcccagcactttgggaggccgaggcaggtggatcaccaggtcaggagttcgagaccagcctggccaatttggtgaaaccccgtctctactaaaaaatacaaaaattagccaggcatggtgatgggcgcctgtcccaggctgtttttatgttatgtggggatgaggcactgaccctgtgggccgggatctctctggggacgcttcccttgctttttgtctacactccttaaggcaaactacttgggaggctgaggcaggagaatcacttaaacccgggaggcggaggttgcagtgagctgagatcgcgccactgcactccagcctgggcgacagagcaagaatccatctcaaaaaaaaaaaaaaaaagtaacaagactcttaacagctgtggagatctgtgcctattctgagtgcttctccactacttcctgatactgatttagctctgtgtatatatttgttgaagtaatgcttagatcttagttgtattcatccagtgccctcccaatcatgttttgtgtggaatagcaaatcactttctgcttgtattccaaaaatgttgcagaaagacttgccaccctgctggggactgtccctgccccctgaccacttctggcctgccttacactcgattattttgggcaaaaagtgcaaatcaagactgagatgtcaggccaggtgcagtggctcatgcctgtaatcccaacactttgggagccgatggatcactcaagcccaggagttcaagaccagtctgagtaacatggcgaaaaaaacctgtctttacaaaaagtaaaataattagtgaggcgtgatggcatgcgcacacctgtagtctcagcttctcgggatagtcacagctacttgggaggctgaggtgggaggatcacctgaggccagggacacaggtacatcaaggctgcagtgggctgtgatcacaccactgcactccagcctgagtaacagagtaataccctgtttcaaaaaaaaaaaaaaagaaagaaagaaagaacaaacaaagaaaaaaaacaaaaaggaaaaggaaaaagaaagagagagagagagagagagataatccaggactttttttgaagggagagggaaacaggactgtctgacacgcgggaaaattgcttgaattctccagccttcccatttggatgcttttctctttgcgtgaacacagccataagctggctcgttatagaggcataggcagtggttgaaaatacaggtcctagcaacaaggaagtctgggtttgaatccagactcagccactttccagctgtgtgacctgggagaagtcactgttcctctctgagcctggagctacctgcatcactaccctgaactgatgaatggaaagcacttggtacaaaatccagcacatacttggcacacataactcacagctcggtgtaattagaagaatgccaggaggactggcctgcacgctggaaggggctctagacaaggctgaccatcaggatccactggttggtccagagatctcggaacagactggttctccccgccgcttctgcctcccactcacctccacccgttcatgcaactgtagttttcttagcccctgaaaccgggttggggctgccgcaggggccatcaggctgtgagggaggctgacgcggacacagtaggtaagaggccaagatgtacagtcctgaaagagggcaggaggctggtgactcagtgggtgagaaaatgcaaaggctggggctatcttagcccagaaaaggacaaattttttttccccaaattattttccttcttttgtctctttctcccctccctctctcgctccttcctgcttttcttcctttccctccgttactttctttaatccaaaggaaatttaagtggaggacataaaagcatatgctgttattaatttttgcaaatgtccttaactgagaggcactgagcagaaagaagaacacaattgcatctccattatcttcatctgggccaccagataccagccacccactctctcagacaatggcagaaaggacaagccagcccccagggacccggccctgccagcttacctgttggcacacctcccctgagcactgcagcctcaccaactgtctggggtccctgagactgcctgctcacactcacctctgagccttcctgtctgctgttccctctgcctggaacatcctctccactcccccttagaccccctctagcagctgtcctggctgactgctaattggctttaggattcagggaggcatcctgccttgggtgccttctttgatggccacagatcaagttaggggtcttctctggctgcttatcctcatagcacctgctcccggatgtgacagacagcttcagttttgtcaccctgtggtccagcagctttctgagggagggctgggaccagctctcatttacctgtgtctctcacccctgcaaggttctggccacagcaagcaatgcctaagcacatatttgtggagtaaaggtataaaagacaaggcatcccagatgggcgtggtggctcaatcctagcacttggagagtctgagacgggaggatcacttgagggcaagagtttcagaccagcctgggcaacccagtgagaccccatctctacaaaaaaaacatatttttgtttgtttgtttgtttgtttgttgttttttaattagccaggcgtattggtgtgcacctgtaatctcagctacttgagaggctgaggtgggaggatctgttaagcccaggaagttgaggctgcagtgagttatcatcccaccactgcacttcagcctgggcaatggagcaacaccctgtctcaaaaaaaaaaaaaaaaaaaaggcaagacatcaagacatccctggaggaagccactctgtagaccacaggctaacagagcatggttgagcagggaggagttgggagctgcacccagcacctcacacaatgttatcatggagctggggacagagcaggttccagagctgggtttgagtcccagctcctccgatgatgatatgacaccccagacatgtgcagggatgtcctctaagcctcagcttcctcactgcaatttggggctctgtctctttctggcagggagttattgggaagaccaaatgagatcatgtccccctcccaaaccctgcaaggcctttgcgtcacagttagaatgaagtctacatatagccctgtccactcgcagcctgcctcccttccccattcgcacccttacacacggagccccctccaacctcccccccacacacactgagccctgtgctctttcctctgcccaaatggcccttccctcagacatctagatgtccatcctccttccctcagtctgcctctcggagcagtcttcccgaccactacaacgatgcctccccaaccccggcctgcgtcactccccacgcccaccctgctttgcagcatcgctccctggctgacattacatcatgcatttatttctttgcttattgtctccctcccctccatgagggcaggaaccttcatctgtcttgttgacagtagcatccctagaacctagctcaggcctgactcacagtgtgtgctcagtccacatttgggaaaccaatggagagatgaatggcacagagatgcgctcaggaacccagttccctgacctcccatccaggctgcacccctcaggagtctaggttcctgctgattggtagagttcaggacccagggctggaaagtgtccacccacagggcagatgggccaaggccacgtgctcaaggtgtgcagggctaggagagggggtcagccccagctcccatatgaggggcatgtgcctcgccttgcccctgctttggctagagggtaccctgttcaccagagatgagcctaggctctccccgggcctggctctggctttaccccagagccctccaactcgcagacctccaggcaaggagggctggggacccacccgtaccagccatttgccttttctccagtaacagagcccagaggggtccctgcctgggcccaaaatcacacagcagattggggtagagccggagaggacccgagactcctgtgccagcctgggcatcccctccactgccagggaaggactgcatccaagtcgcatccgtacccaggccgaggtgtccgaggcccaggctgaaatccggttgctgctgcagagaccaagtttccaaggccttgtcaagtgggctgtgccagacgatccccaggcctgtcattggctgctcttcggctcggacacaccaaacctcaccaagcacttccatttctgagggaatagaggttgtggcttccgtcaagcacccatttaccccaccctcctcctcctcttcctgcaaacttgagtcacagctgccctgctgggctcaggccccagggatgtctgagtcagcctggctggggttccagtcctgacaccgcccttaccagctgggagactccgggaacctccaaccctgctgagcctccacttcgacatccgtgaaacagccatgaataagcaggtctcaaaggtcgactcctgtatgcagggacacagcatgcagtaggtgcccaatcataacagcagcacccacctggagccccttatagcagcccttctcctctgcacttccacatggcatctcatttaaccttcaccacaacccaactaggaaggcaccatcattatcccattttactgatgaagaaactgaggcccaggaaggtgaatttaccagccagctcacaaatggactagtagatggcagtttgtggattggagcccagaggctgtgctcctgcccacaccctctcaaatgagggctataaaataacactctaagagctcttcctacgtgcctggcagtgtactaagaatttgagtcttcagtacgttcaatcttcacaacagccctatgaggtgggggttatgaggagccaccattttacagatgggtaagtcaagacacagagagaggatgtggcttgccacagaccacatggctggtgagcataggagccaagattccaacccgtttcccatcctggccaagaataacactcctgcttcttcatttctccgaaagaagccatgctgtctccatccctggctgtgacttgggctgcttgtcccttctctgcccacccacccacccccagggctgtgccggggaaagaaggtggttcctggagccctctagcctctgaaaagcatggcagtggcgcaacgtagaggatgggcttaaagccaaagaaacacagcttcttttgttgttgttgttgttgtttgggtttttgtttttgttttgttttgagacagagtctcactctgtcccgagagtgcagtggtgtgatcctggctctctgcaagctctgcctcctgggttcacgccattctcctgcctcagcctcccgagtagctgagactacaggcacctgccaccaagctcagctaattttttgtatttttagtagagacagggtttcaccatgttagccaggatggtctcgatctcctgacctcatgatccacccacctcggcctcccaaagtgctgggattacaggcatgagccaccgtgcccagtcttttttttttttttttttttttaagacggagtcttgctccgttgcccaggctggatgcagtggcacgatctcggctcactgcaacctccacctcctgggttcaagcaattctcctgcctcagcctcccgagtagcttggattacaggcgtgtgccaccacgcctggctaatttttgtatgtttagggttttgccatcttggccaggccagtctcgaactcctgacttcaggtgatccgctcacctcggcctcccaaagtgctgagattacaggcgtgagccaccatgcctggccaagaaacatgggttctaatcccaatgcccccgcttcctagctatgggaccttgattgagtcctgtaccgtgcctcagtttccccacttataaaaagaggttactaaaaaggatgcttcactcaagggtgtgaagacccagtgaatgaagtgttaataagagctccacgtatagcgatgctgctgttcagctgcaccagggtggactcccttgacttgctgggagttacaatgaggaaggaaggaccgttaaacctgtaggtctttccagagaaagtgcgtttcctaaaaccaaatcctgcccttgctccaaaactgtcagtggtggtttcccatgaccacgccacagtcccagggtctcccctggccttcaaggctggcacagtctgaccctgccaacgtccctagtgccaccatctgtcagcccctccttgctcctgctcctggtctgcacatgctgttctctttgccaagaatgccatttccccagccccctggtcccgatggggaacacctcctcatccttcaaagccaagctggaagggaacatctttggagatgccgcttgacctcccaggcagaaggggtcattctccctggagatgtggtcacgtcattaaccacactgggttagaatcatcagaagctgttcctgcctcttccgtcaagcaaggggctctggaggccagaaaatgcctatgaatcatgcccacacccccagagcccagcatggggcgggctcaggttaggtcaatcgtgtttgaagactgaataaatgaatgtcttcatttgctaccctcagaagcccagtccggaaaaatattccagtgcaaggtttttggcttgaatgagatcccaagaatcaccttcaggttgtcaggaaaatgatacagggaagggaaggagccaacaaagggtatgggaatgagcacataacactatggacagctggggaaccttgggcgatgatgcagaactgtttatcactaactctcaccaggtcagttgtgcatcaaggctactcgggggatagcactttacagcctactctagcaccacggtggccttctggggcaggggccagcaggctgcagctgctggatgaagcccccaggcagagtcgctggtcctcaggtgctcaagcttagctggaagccttcaggttgctgtgcaatggaatagtgagtacccagaggatatgtgcgtgtgttacagtgagtgagtgaatgaacgaatgaatggagaatcaagaaaagagccgcgtatcttcagtcattgagcagacacgggccttctgctgtgtggccctggacgagccatcatgcctctctgaccctggtttcctcttctataaagcaggaatgctagcccagcctcccaggagataaagggtgggaggtccccagagagtgagaagggttccacctgggctcccagactcaatctcagctccaggaagcaggacatggccccagtgagggttctctgtgggtgaagaagccacagaaggcaggcacagtgccctggttggaaccacaggggccccgaagcaaccacatcatggccaccacagcctccaccatcccacagcaatttccgctgctgcctctcccagggcaagatctcccaccagtggctggctgtcccctctgccagcacctgccccgggtgggccctgcagcatggccatggctgctgcaaggcaggctggcagctgctcctgtgtgcagcagcgtgtctgctttgaaaagccacagagactcctgtggttaggggctcatgttacagtagcacacgttcgaatcccagttctactacttgtgactgtgggaaagtaatttcaccccagtcctctctggtctcattgatcaaatggaactaacattctattgtcccctctggtggtctcaactccagcagtttgtgagatggttgccttcactgttttccctactgcaaaacccataaggacacagttatcttgcctcctgccccaaccccagggtcttgaacacagtaagtgctcgataaatgcttggtaaatacatgaattattgtctgacccgccttgctcttccagtccaaacttaaatgtcgcctcctccaggcagctttccctgattccttccccgagttcccagaatctcttccaactcctttaacctctttcctgcagctgcctggcctactgggtgtggccgccagttatcggaccccgcaccctccacctacctttccccaggtttgcgcggggcctgccggcctgcccgcccgccccgagggaatgaagggctggaaggaaggggagggagaaaggaggcggcgcagatacatccagaaggggaggcggcgggggattctcgaaggcccggccaagacccgcagcctcagcaagccaagatgcgagcagggggccggccggaaggaggcgggggaggggcggccagggagctggacgctagcgggcggacgggcgggggcggcgggggtggcgggagggttgggggcgggggcctggtatttcctgaggcccttcaggaaatgctctgggccgcccctgggcgggatcggcggtgggatgggtctgggagggatccacaggctccttccctgcgctgccctggactctctggcgcgctgtctctgcgggccctcttccccgtcgaggaggcgctgctcaagccccatttcacggaggaagaaaccaagactcagagagggccaccggggtcacagtctctcctgcacagttctgcggctgcgccagcgccggcccgctccctccacgtccccggcccctgtcagggctgcggcagccgcagaacccccgggccgggctccctatggcagggccagggcggaggactgggagacggggcgggaaggcgaggcggggcccggcgtatcccacgcacagaccgcgcagcgcgcacagccccggccctcagggagagcagtgctggctgccctgccccggatcgtcctcccctgcctcggcccggacacggccaggcaggaccccgcgacacatccgacgccccacctcacactcgggaccctgagacactcactgttcacctaacgactcgctccctcctccgctgacggaggagtcagtccatcgggactggatgggctccgtgtgctcgagttcaaatcctgcctcaccacccgctggctggcgcttttcttgtctaagaagagcaccgcagttccctctgtgtggtggggataacagcacagcctgcctcagaaagttgcagtgagaactaaatgcgttctgctgggcgcggtggctcaggccttaatcctagcactttgggaggccgggcctgaggacggcttgaggtcaggagttcgagactagcctggtcaacattgtgagaccccccccccccccgtctctacaaatttgtttttttttgttgtttgtttgtttgttttttagccggagtctcgctctatcgcccaggctggagtgcagtggcgcgatctcaagtgagcgatctcagctcactgcaacctctgtctcccgagttcaagcgattctcctgcctcatcctctcgagtagctgggactacaggcgcgtgccaccacgcctggctaattttttgtatttttgctagagacggggtttcaccgtgttagccaggatggtcacaatttcctgacctcgtgatccgcccgcctgagcctcccaaagtgctgggattacaggcgtgaaccaccgcgcccggcctacaaaatatttttaaaacgcgtcgatcagtataaagcgctgtgcctggcacatcctgtgctcaatctgctattgtgacaaaatcgtgctcaggcccctgccacctgcaaacaaagtctctctctctttgacattttcccaccaccgtttcaacctgcgcagtctctccttttctctctccttctgaattttaacaaatatccctcttctgtaaagtggctgaaaaaaaaaaaaaaggaaaacaaatcacaatggcttagacaaataagggtttatttcccctatcactgtgaacccggagaccagccatggctggcattgtttccccagcccagtgatggcagggctgacgtcctctgtaatgcgcttggcgtttcccccttgtttacagcgtggctgatgctgctcctggcgttgcatctgcctccgcatttaagacagaaaggaaaaggaatggttactttcagggttaattgaaagcgtttgtcactttcgtcaataatttcccaggcaccccgcccccctcaccccccacccccacccctgccacacacacataatgagatctaatgagactccttagatgtcattggccaaaactgtgtcacatggtcactcccagctgcaacaaaggctgagaaggtaagtagtttctcttttccagcctccacagtggaaagcagcagggaagaggggaattgggaatggtacacaaggatcagtcagctattataatagtgtctaccacaccttccccctccgtcttcttccagcccctacactccccaggacctgccttccagccacccctgacctcctccttcatccaggggccacctgtttccatttcttttgggatatcagaagctcagaactctggggctgcacttttacagggtagcaatcagatgacgctgagtagaaccgcatctttcttttcttttctttcttttttttttttttttttgagacagagtctcactccatcactccagtctgcacactaggctggagtgcagtggtgtgaacactgtagccttgagcccccgggcccaggtgatcctcctacctcagcctctcaaatggctgggactataggtacatgccaccatgctcagctaattttttttgtttatttttttgtagaaacagcgtctcttgccaggcgcggtggctcacacctgtaattccagcactttgggaggccaaggcaggtggatcacaaggtcaggagttcgagaccagcctggccaatatgaaaccctgtctctactaaaactacaaaaattagccaggtctggttgtgggcacctgtagtcccagctacttgggaggctgagacaggagaatcgtttgaacccgggaggcggaggttgcagcgagccgagatcacgccactgcactccagcctgggtgacagagtgaaactctgtctcaaaaaaaaaaaaaagaaaagaaaagaaaaagaaacagcgtctcttactctgttgcccaggctggtctcaaactcctggtctcaagcgatccacacaccttggccccccaaagtgctgagattacaggtttgagcagcgcacctggctttccatactcagattctgaaacacagatctcatcgtatcactcctctggctcaaaatcacccttaataattggctctactagagccccatttccctatactccctgcctttgaatatctcactgttgcaacactgaaacacttaaagaatctcctctgctttctctctggttgcttctaggatctcctctttgactttggtgttctatattttcactacaatatgtccagacatgaatttcttcctacctatcttgcttgggattcattggatctctagaatctatgcatttggtggtgcttattagatatggaaaaaaagtcagacttcatgttttcaaatattgaatttgtctcgttttcccttctctgtctggaactgctacctatgttagctcttcctgttgtattctccctggctcctaaccactttttttctttgttttctcctcctcctcttcctcctcctcctcttcttcttcgtcttcttcttcttctcctctccctcctcctcatccttctccttctcctcctccttcttcttctccttctccttgctactgctgccacctcctcctcctcctcctcctcctcctcctccttcagctttctcaggttgaattcttctttcccccctgcccccattttccatttatttttctttctgggttgaattctggataatttcttcaaatccatcttccagatcatgaattctctattcagctttgtctaaactgtcgtttaaactctccattgagtttttaatatgttaccaggtgttaaatttctagaagctccatttatttctcctgcacatttgcttagttcttctcattcctcaccctttgctcatgttgctccatcttctcccacctcttctcctggcaaattcctatacaacccatttctttccatccccagggagctttccctgacctccaggatggactggggctttcttgggcccttcagtccctgggactcctttgtcacagcactgatcaccttcagccatgattggctgggtctggatctggatctgcctccccccctcagacctgtgcttctaataagcaggggccatatctgcatcctctctcagggataagtacaggtggttttcaataaacttgtataaaataaaagcaatttccttagcccccccatcactccttagtcttacttgttgtttcatttacttatttttcttttctgtaaagtatattacttactgccagctacatgcaatcaattgtaaaatactttcaataactaaaaattgaataatggtaaaaaaaaaaaacacacatcagctttcagtataatttgcttaaattgttctagaaaacactgctaatttttgtttctgcagagtgaagtacagaagtgagcagactgataaattttttttttttttttttggagacagggtctcactctcttgcccaggctggagtgcagtggtgccatcacagctcactgcagccttgatctcctgggatcaagtgatcctcctgcctcagccttctgggtagcagggactataggtgtgtgccaccatgcctggctaattaaaaatacttttttttgtttgtttttttgtagaaacagggtctcactatgttgtccatgctgttctcaaactcctaggctcaagtgatcctctggcttcggcctcccaaagtggtgagattacaggtgtgagccaccacacccagcccagattgataaatttataaacatcatggaaagaatgatagaaaggaactggagccacttgaatgacatttggattccacttgtcataaaccactcctcttttttctacctcttggaaaacatctttctttggaacagaaaaatgttagtgtcagctggcagccctgatcctccatatgggatggagtaatggtcacctccaggtcaccattggcttcttagattctgctttatttttgccatagcagtgctagatcaggtattccagataaccagtcagcaaaatagattttctccacaatgctttaatcgctgcctgcctaaagatctctaaactgtaagaaacagaccaacaaaatgggaggatttgaaatttggaatccactaaccccagggattaactgcagttggttatccatctcaaatctggtgctgagttcacagccaaaccaccccagcagcacagctttaatcatacgggcatgcttttcatggaaaaagtacctgccagacctcctgctcctgcattcaaattattgtgggaacaccagtgggcaaagtcaactcttctgtcacgtaagtgagttcagcatttccaactgtacatgctagatcaagccagcaaaacatcccttcacttgtccagctttcgtggtagcaggtatattaaagagctgcctagtataaaaatgcagcccactgaacaggattgctgtaattgagcctcctcccttctcaattgcttcagggatatcctttattttattttatttatttatttatttttctcagatggagtcctgctgtgtcacccaggctggagtgcagtgacgctatcttgactcactgcaacctccacctcctgggttcaagtgattctcctgtctcagcctcctgggtagctgggattacaggcatgcatcaccacacccagctaatttttcttttttttttttttttgagacgaaatctctctcttgtcccccaggctggagtgcaatggcacgatctcagctcactgcaacctccacctcccgggttcaagcgattctcttgcctcagcctccagagtagctgggattacaggcgcctgccacgacgcccacgcccagctaatttttgtacttttagtagagacggggtttcaccgtgttggccaggctggtctcaaactcctgacctctggtgatccaccggcctcggcctctcaaagtgctgggattacaggcatgagccaccgcgcccggccaatatcctttattcttaaggtttcctcccccgtcttggctttataatcccctttcctcaatgttaactccatggagtcgtagctgtgactcaacagtataatgattaaaagagaaagctttggcttctataagaattttataccatttggtataggcttaaacaataactggactaaggctgggcgcggtggctcacacctgtaatccaaggagttcgagaccagcctgtgcaacatggcaagaccccatctctacaaaaaaatacaaaaattagtctggcgtggtggtgtgtgcctgtagtcccagctacctgggaggttaagatgggaggatcacctgagcccgggaagttgaggctgcagtgagctgtgattgtgccactgcactccagcctggacaacagagtgagaccctgggtaacagtagaagatgtagattaacagtcagcgcattcactagggctatttctttctcgtaggctcctatagtccttctgtaggcctacaatactctcatctctgtatcccaaggatgctgccttcttcgtgaccataggctcccattttgccccactcaactagctcttcttcaagatctgttttaaccatttttggttgaaggccaagaggattttccaggaaatagatagcattttcatccttattcactaaagataaatcaactggaggcagatcctgcattttggggacataaaaatactccccagctgggcacggtggctcacgcctgtaatctgagcactttaggaggccgagatggaaggaccacttgaggccaggagtttgagagcagcctgggcaacaaagcaagaccccctctctggaaaaaaattaaaaaattagccggcatagtggtgcaagcctgtgatcccagctactgaggaggctgaggtgggagaatcccttgagcccaagagttccaggctgcagtgaatcaagaccgcacaactgcagtcagcctgggtgacggagtgaggccctgtctcaaaaaaattaaaaacaaacaaacaaaaaaacctccctgaagtgccttagcttatgttcctgaactaggtggaaactgtccctgtcatctgcttggcggcatttgagttcaaccatcatgctctgcactgtgacagctgacaaattgttctcggctagaattcttatgtgatcctcagctcccagaacccctcaagaaacttctcaagcattctttacaaaggtataggcaagaccacctcaaacgacagtgcctccactcagggctccttcccctaatcagactcaggtaaacaaacactttcttccatgtacttgcttttaacttcattaattcacttccccatctgtaaattcatttcctcattcattcatttattcattattcactcgataagtcttttcttttcttttcttttctttttttttttgagacagagtctcgccctgtcgcccaggctggagtgcagtggtgcaatctcggctcactgcaagctccacctcctggggtcacgccattctcctgcctcagcctcccgagcagctgggactacaggcacccgtcaccacacctggctaatttttttgtatttttaatacagacggggtttcactgtgttagccaggatggtctcgatctcctgacctcgtgatccacccaccttggcttcccgacgtgctgggattacaggcgtgagccaccgtgcccagccaagtcctttcttttcttttcttttttttttagagatggagtcatgctctgtcgcccaggctggaatgcagtggcgcaatctcggctcattgcaacctccacctcctgggttcgagccattctcctgcctcagcctcccgagtagctgggactgcaggcggatgccaccatgcctggctaatttcttttgtattttagtagagacgggagtttcaccatgttgcccaaactggtctcaaactcctcagctcaggcaatccgcccaccttggtggattacaggcttcagccactgcgcccagcctcaatacatcttttcttttctttctttctttctttttttttttttttttctgagacagagtctcgctctgtcgccaggctggagtgcagtggcagaatctcagctcactgcaagctccgcctcccgggttcaagtgattctcctgcctcagcctcccaagtagctgggactacaggcgcccgccaccacgcccagctaatttttttgcatttttttagtagagacagggtttcaccatgttggccaggatggtctcaatctcttgacttcatgatccacccacctcggcctcccaaagtgctgggattacaggcgtgagccaccacgcccggcctctataagtcttttctaagcacaacataggttgatgccagcagatacgggatgaactaatgagtgacagaggcaatctgctgtaagaaattctaacagccaggaaggcttcaagttggggtgatactggagcagggtctggaaggaggaaagttggggaaaatgctgggatcccacagcaatgtgaagagggccccagtgggaggtcgccagcccatgggacgcagcccgtaggaccttaatgctccccagcatatgagtagtgcatgttcttcctctctttgccatgcctgtcaggaagctcagagctcagcttggtgcaaaggtagcaactgttgtttgccagaggttttgtagttatctctgttttgtcgcccaaaatctttgacctttacattgtctatgtctcttatggaaaacttgaaattgatggagtaaaattaataataataataaagacctgattctcagtaagtgatggattcaggacgtaaatgcagctcagagtccaagagttgtagactgacaccaggcttgtattagctatcactgcaataatgccacataacaaaccaccccaaaactcagtggtttagaacaatcatttaattccccctgatgcatctgcaggttagctgaaggtcagttggtcttggctgggtggctctgcctcaggctaggctgggatacaggctctaggctgggctctggctgttccatgtgtctcttggcggggcgaggctgaagggccggcagccattcagggggacaatcttctcacagcagaagccaagaagacagctccactgtggaagtgcacctcaagcctttggtcttgttatagccactgctatcccattgaccaaagcaagttacatggctgagcccagagtcaagagacagggagtgcactctgcccacctagaggccgtggccagcgtgaggggccaatgatcaatgccacatgccatttgcatcatccagtctggtctccacccctatttctcagatgggtaccccaggtggatcagtgtgggaccaggcagggtgccctgacttcccattcccttttcacagccccgagcaggatctcatatcacctggctgatcctcctggggtgggaccaattctggaaactgcagttgcaggtggaagaacctggacttcggaatcacaaagacctgagttctctgctccccaaggccagcagtgagtccctgagcaagtcccacctacaaaggaggaaactgaggctcagaggggtttggcgacacatagtaagtgctccatcaaaagtggccattcaggctgggcatggtgggtcatgcctataattccggcactttgggaggccgaggtgggtggatcacttgagcttaggagttcaagaccatggtaacatggtgaaatcccccctctacaaaataaaaaactagccaggcatggtagtgtggacgtgtagtcccagctactcaggaggctgaagtgggaggatcacttgagcccaggagatcaaggctgcaatgagctatgacagcaccactgccctcaagcctgggcgacagagtgagaccctgtctcaaaaaacaaacagccaggagccgtggctcaggcctgtaatcctagcactttgggaggctgaagtgggtggatcactcaaggtcaggagtttgaaaccagcctggccaacatggtgaaaccctgtctctactaaaaaaaatacaaaaaaattagctgggcgtggcttccgtgggttccctatcccatggagaacccacgggaccaagcaggcaactgctttcgtgtattgcttcattgaatcctcacaaccaccttgccttataaaagaggtgttgctattatccccgttccacagaaggggaaactgaggcacaaagcagaaaggtcacgtgcctggaatcacacaccagaaagtggcacagctgggattttaacccatgcctgccatgctaggaccagcatcctagcagccaggcaccatcccccagcccaggctgactgcccgtgcccagctggactccagggcttggcagtccccaggatgaaaagaggcccctccctgggcccttcaagtcactctgcctgggggtgacacatgcagccacataggtctccgtgagttgcggtaaggtcttgggtctctttatccctggcatgcggcgggggcaccaaagtgacctcagggatgcggaagtacaggagccagattgccagctgtgtggctctggcaagtcacctcccctccctgagtctgtttcctcaactataaaaagggatcagtaaatgtctcttactcatgggattgtgggggattaaattatttgataaataaatgaatcatttaggaaagttcctggaatatagaaacacaagaagaggcagaggaggaggggggacaatattactattgataatattatcctgggaagcttttgctgccagaagcaggagggacaatttgctgggaaggaagaccctaggaaccagtccttcctgtggacctgggacccagcacattgcaggtagttggaaggggcctcagaccatctctggaaactccattctatagatgatgagactgaggcctgggagaggcagcccctgggtccaggctgctcagcagagcaggcaggctgcctggccccacctggccccctgccctccttccatccagtcagtccccatccaccagtcccaatccacccagtatccatctacccagttcccatccacccagtccccatccaccaatccccatccacccagtccccatccacaaatccccatccacccagtccccatctaccaatccccatccacccagtccccacccacccagtccccatctacccagtccccatccacccagtccccatccaccaatccccatccacccagtccccatccacccagtccccatccaccaatccccatccacccagtccccacccacccagtccccatccaccaatccccatccaccaatccccatccacccagtccccatccaccaatccctacccacccagtccccatccacccagtacccatccaccaatccccacccacccagtccccatccacccagtccccatccacccagtacccatccaccaatccccacccacccagtccccatccacccagtacccatccactcagtccccatccacccagtatccatctacccagtccccatgcactcagtccccatccacccactatccatccacccactccccatccacccagtccccatccactcagtacccattcacccagtccccatccacccgtttcccatgcaccctcacccaaccctggtctccagtctctcagattgaggtcacctcagcttctctgcactgcagtggccagtgcaggcagtgcccccagccccccagcttgacctctgaccttccaggactccaggttcccactccagcaggttaacagtgccagtaattctgctatcattgcgcctccatggggtgcggggagcaggctgtgtgggcccttggaagctccctaggaaaggatgaaccccacagtccagggtcctctgcacaacgctcagagcaggatggaggaacattgggggaagaaggtgggcaggccccagtgtaggagacaccaacatcccccacccatatcctgttctgaggccaggaagaggcctgacctacccctcctcctccagtgagcctttcttggctgaccaggaggcagctctgtacaagggctccagcccagggctgtgagcaagggagaccatgggccagccccaccccttctgggtctcttgttcccttcataactggaggacagatggcagcagcactcaggaaaggctcaatgctgatgcacccgggaagtgctgtgctgcacgggcccagtggctggacaggactgtgggagcccacccagccccttcctccctgtcttagtgtgtttggtgttgctctaacagaatacctgagactagggcatttacttctttgtttgttttttagacagggtcttgttctgtcacccaggctggagtgcagtggccccttcagctcactgcagcctccacttcttgtgctcaagtgatccttccaccttagcctccagagtagctgggactacaagtgtatgccaccacacctggctaattttttaaatttttgtagagatcgcatctcactatgttgcccaggctggtctcgaacttcctggcctcaagcaatcctctcaccttggcctcccaaaatgctgggataccatgcctgggcataattaaatttcggcaggagcacctcctttacgcctcaatctgtgcctcaccaaggccagcgctgcacgactccagggggccatgcatgtgtcctggccgaccatcctcccctgaccaagatgcattctgaaaagatccgggggccggctctgggccttcacacatgctgttctctccacctggaacacacttcgctttctcaaacgccacctcccatttatttttcagcatacagttaaaaaataaactcctgggaaacctgcctttatccagctggtaaagttctcctgtaggttcccacagcacccgctgcctcagtctcctccccatcctgtcgccccaccgccccaccgccccaccgccccactgccccaccaccccacaacccgccgctctctctgtctccccaggctcagccctactggtgcctccttgcgcccggacacgtgtagacagcgccctctgctggcgactctcagctagccgctcagcctcgcccgcctgggtcccagctctgccccaggctcaggtccggggccctggaggtccaaatgaggccagaatcccgggaagagtcacccggagaggagcctcggtctcggagccacagaccctgctcaaatccctctcctgccttctaattttcatgtggcctcgagcaaatcatcttccttccttgagattcagtttccccttccgcaaaatgtatcctccacaactcttccctgagtacttaccgtgtgctagatactgagttgggcaccggcgataccgcagggacaacgatgagcaaagtcactgcctcaggaagctgacatagaggggacgggcaataaacaataaacacaacgcggaatgtcagttgtctatctagcacagggtgagtgcttaaagaagtgaagccggaccgggcgcggtggctcacgcctgtaatcccagcactttgggaggtcgaggcgggcggatcacctgaggtcaggagtttgagaccagcctgaccaacactgagaaaccccgtctctaccaaaaataaaaaatgagtcaggtatggtggggcatgtctgcaatcccagctactcgggaggctgaggcaggagagtcacttgcacctgggaggcagaggttgcagtgagctgagatcacaccattgcactccagcctgggcaacaagagcaaaactcagtctaaaaaaaaaaaaaagccgggcgtggtggctcacgtctgtcatcccagcactttgggaggctgaggcgggcagatcacctgaggtcaggagttggagaccagccaggccaacacggtgaaaccctgtctctactaaaaatacagaaattagccgggcatggtggtgggcgcctgtagtcccagctacttggaaggctgaggcaggagaatcgcttgaacctgagaggcagaggttgcagtgagtcgagatcgggccactgcactccagcctgggcgacagagcaagacttcatctcaaaaaaaaaaaaaaaaaaaaaaaaaagggaagtggagctggaggggccagtgtgtatccgaggatgcgaggggaggcctcatggggaggtgggaacatcgatgcccccgcagcacgctgtcatagccatgcaaatggcacgaacgcccagcatcctccctcatgtgctctccttgggccacctcccagctctccatcctacttactgtgtttatcgtctgcctgcccaggagaaagtcggcctgtaagtgcggggatttttgtctgtctacttccatgggtagccccagcactgagaacagtgccttgcacacagtaggtgcccattgggtgctggtttatcgatttttgcgctaaccatggggcaggacggtgcctctcactcagccgcccactcctcatggtgcctctcactcagccgcctgctcctctatcaactcttccagagccagcacttgtgatcaaataggggacagctgggaggccataggaacctggaggagcctgacggactctggggtgagtgctgagaggcttcctggaggaggcagtgcatgctgatgtgagacttgaaaagtgggaatgacaaggaggaagggtgttcaaggcagaagtaacagcaatgaaagctgtgaggcatggagattcttcaagtgattcaaggtagctggagaagagagggcaggtggcagggatgaccaggtcagagaaagacttgaggaccaggccaaggggcttggatttcattctgggggttggagaggcactgtggcctaatatgtgaacacatgggccctgagtggtgtccacctgctactcaggaggctgaggtgagaggatcacttgagcccaggagttcgaggttgaagtgagccatgattgtaccactgcactccagcctgggtaacagagtgacaccctgtcttaaaaataaaatgaataggccaggtgcggtggctcacgcctataatcccagcactttgggaggccaaggcgggcggatcacaaggtcaggagatcgagaccatcctggctaacacagtgaaatcccatctctactaaaaatacaaaaaaattagctgggcatggtggcgggcgcctgtagtcccagctactcgggaggctgaggcaggagaatggcgtgaacctgggaggcggagcttgcagtgagccgagattgcaccgctgcactccagcctgggcgactaagcaagactccatctcaaataaataaataaataaataagtacattaattgacgtttcaaaattcattctatttttctttttaataacactttatctatttatagaacaattttacattttattaagccccactttctaggtgtgaattctgctgctgttgcttgctggcaatgagatgttaagttgcttaggctctctatgccttggtttccctgtgtggaaaatggacttaaagatatttcagacggttgttggtaagaagtgagttagtacatctgaaacatgtatcatatccagtaggggcttaattaatgttagctgtgattattacattcctgtttattttcctctacagtaagaggcaatgcgagtgaataactggaataacggccatcattaaacttagcgtttacccggctcttcctgtcttggtttgagttctcaaataggccgggcgcggtggctcacgcctgtaatcccagtactttggaaggccgaagcggatggatcatgaggtcaggagatccagaccgtcctggccaacatagtgaaaacctatttctactaaaaaatacaaaaaattagccaggcgtggtggcacacgcctgtagtcccaactactcgggaggctgaggcaggagaattgcttgaacccagggggtggaggttgcagtgagtcaagattgcaccactacactccagcctgggcgacaggacgagactccgtctcaaaaaaaagaccctgagacaagaatttcggtactgggagtttctttgggaggtaaccctaggaggcaccagcaggcatgtggagaagtgagatcaaggggtgaaagccaagaaggagcaggtcactgctgcaggcagcagaggctcagtgctcttgggcgagcacagctcggaagtgtcccaacaagggctggagagggtggcacttgtcctcactgttcttttgcccttcgcccgggctgagcattctcttgaagccagagaaagtccgcagggttgttgaatatatcaaataaaaatacaggactcccagttaaattagaaaacaatgaatgaattttttttttttttttttggtatgagaatgtcccacgttatttggggcatacttacactaaataatttgtcaggccaggcacagtggctcacgcctgttatcctagcactttgggaggctgagatgggcagatcacaaggtcaggggttcgagaccagcctggccaatatggtgaaaccccgtctctactaaaagtataaaaattagccaggagtggtggcgcttgcctgtagtcccagctacttgggaggctcaggcaggagacttgcttgagcccgggaggcggaggtagcagtgagccaagatcgtgccactgcactccagccagggtgacagagccagactccgtctcaaaaaaataaaaataaaaataatagtgataataatttttcactattttttcaaaactcaattttaactgggaatcctgtttttgtttctttgtttgttttgagacagagtctcgctgtgtcgcccaggctggagtgcagtggcgcgatctcagttcactgaaagctctacctcccgggttcacaccatttttctgcttcagcctcccgagtagctgggactacaggcgcccgccaccacgcccggctaattttttgtatttttagtagagatggggtttcaccgtgttagccaggatggtctcgatctcctgacctcgtgatccgcccacctcggcctcccaaagtgctgggattacaggcgtgagccactgcgcccggtcatcctgtgttttcgtgatgtgatgccataggcatggataggaagtatgtggctggcagttgctgctggctgccagctagaagcttagctggagctgttagcccagggcctcagttctccgcatgggtctttctgtgttgcttcttgggcttcctcacaacgtggtggctcatttccagaaggagcatcccaaatgataacaatcagaagctgctagtcctcttgaggtcttaacttggaagtcccagaacatcgcttctggtgcattctagtgggggtgcattctaggggtgaaaacagccacaaggccaggccagatgcaaggggaggggaaataggcttcacctttggatgtgggggtggcggagggcacagggcagggagaagttcttggtggccgcctcagtagacaatcaactacagtgggaaggcaatttccttcttcattcactttcagtctgctgattatgcccaggtaaaatctctgcacagtgttagggctttacgtattttgcacacagtttttccaattatggggtgtgactgcttagtgagctataaagttagtatactgaatccaaattagtttttttaaaacttctttttaaggccgggtgcggtggctcacgcctgtaatcccagcactttgggaggccgaggcgggcggatcacgaggtcaggagatcaagaccatcctggctaacacggtgaaaccccgtcgctactaaaaacacaaaaaattagtggggcgtggtcgtgggcgcctgtagtcccagctattcgggaggctgaggcaggagaatggcgtgaacccgggaggcggagcttgcagtgacccaagatcgcgccactgcactccagcctgagcgacagagcgaaactccgtctcaaaaaaaaaaaaaaaaaaaaaaaaaacaaaatacacgacttctttttaatttgcaaattaaatctgaacatgcacaaaagtggaaggtatgagccctcactaccgccactcagcctcgacccccacctgtttttatacttcttgcctctacccacctttgagtgctttaaaaaataaaacgaaatagatggaataacatacgatagaaaatatcagaaaaggaagaatgttactttgtgaaaaattgtgtctactgagttggaatatgaaacatgtttgcaaaactgtcctcacactttgctaaaactcgtttttgaacagagcactcatcctacacagcctctgtggggaagcatccaacaccatttaataacattgttttgtttttatcctattcactttcattgttattgcctatgaaagtgacacaaattttccatttaagagtagcaatagataaagtccccctttgagtacatgtattgaccaggtgtggtggctcacgcctgtaatcccaggaattttgggaggctgaggcaggaggatggcttgagcccaaaagtttaagaccagcctccgcaacatagcaagacctcgtctctgcaaaaaatacatcaattagctgggagtggtggcacaagcctgtagtcccagctacttgggaggctgaggtgggaggattgcttgagcccaggagggggaggttgcaatgagccgagattgcggcactgcactccagcctggggacagagcaagaccctatctcaacaaacaaacaaacaaacacgcccccccccccatctctttatagaacaattttaagttttattaggtagttatagttgagagagggtgtggtgagaacacgagagtggcctcagcccagtcccaccagagtctgcggagccgctgtctgtccctgctcctggccggtctgcggcaatcccgtcatttctgcctcggtctctgcgtctatggggaccggtgcgtgggtgggtcagtctctctcttgcgttctgtgtctgtgtggcccggacgctgaggggtgtggagtggccctgccacaggccgtccttagcacagcccccgggggacccctcattcacttccgggaccggaaggcgacctgtagttccagaagccgccgcaagagggcagaggcggccataggatggggcgcggcccgctgggggctgccttgagatgcggctaagaaacccggcagccctgggaggaaccacactcccagcgccccacatgtgggttcgaacctgggctcctccattcctaggttaaggctcttaatcctgccaccagtaaaatgggttactgtaagctttaaataatgtgaatataaggtacctagtttgtgaacctgtttttcccgtttgcttggggaactgtggacctcccacaggggctgggaccttttaataagtcatacaatttaaggaatttttatttccctagtgtctggtactgaaagcagtgagcaagggaatgacatgattagaaaatgaaatagaaggaaaaggaggagggggagtggaagaggagggggaagaggaaaaagaatatgataaaatgcacttaaaaaaaaatccaggggccagacatggtggctcacacctgtaattccagcacttcgggatgctgaagtggaagggattacttgaagccaggagatcaagaccagcctgggcaacacaatgaaatcctgtctctacaataaataaataagtaaataaataaataagtcaggtatggtggcgagcacctctggtctcagctacttgggaggctgaggtgggaggttgacttgagcccaggagtttgaggctgcagtgagcagtgatcatgccactgcactccagcctggatgacagagcaagactcttatctctgaaaagataaacaaacaaacaaacaaacaatctattatcctacccctcatcaataaccacattgggtttttgggttttcatacgtgaatttgtggtctttttctcacaacaaactcatacatccaaatataaatttatgaatatttgctcacaaactcaaaggtgcaagaaatgtcacactacttcattaaattaaaaaaaaattttaagtacttgttttataaacatgctcaacagaaaaaatccaagccacttagaaagtatacagaaaaaaagcaataaatctcccccatctgtggggttttatatttcatgaacatcatcatagaattctctccacacagcctcaatctatctatataagatgaatgaatggatggacaggcaagttttttgttttcttgagacagggtctggctttgttatccaggctggggggcagtggtatgatcttggctcactgcaacctccacctcctgggctcaagccattttcccgcctcagcctcccaagtagctgggactacagatgcgtgccaccatgcctggctaattgttttgtattttttgtagagacggggtttcaccctgttgcccaagctggtcttgaactactgagcacaagagatcctcctaacttggcctcccaaagtgctgggattataggcgtgaaccaccacgtccagctgacaggtaagattttttaagactgggatcataacccatgctattctgtttgtgtgtgaacagccagtgacttgtcattatgtacgtatgcctgtgtgttttaagtgttttaaaaaattaattagtagagggcaggcacagtggctcatgcctgtaatcccagcactttgggaggccgaggtggacagatcacctgaaatcaggagttcaagactaacctggccaacacggtgaaaccccatctctactaaaaatacaaaaattagccaggcatggtgatgcatgtctgtaatcccagctacttgggaggctgaggcaggagaatctcttgattcagtgagacaagatcgcaccactgcactccagctgggacacagagcaagactccgtctttaaaaaaaaaaaaaaaagaattaattagtagacttttctgggaggagcggttataggtttacagaagaattgagcacaaagaacagaatccccatacatcctctctctcagacccctacactcatttccccgttagtaacattttgcattatagcgtgatacttctgttacaactgatgtaccaatatgcatatggaattattaaataaggtccatagctcacattacagctcattcctggtgttgtacattctgtgggtttggacaaatgtgtaatgccgtatccaccattgtcatgtcatacagagtagttttgtggccctgaaagtcccctgtgctctgcctgtccatccctccctcccccaacccctgctaaccactgagccttttactgtctccatagttttgcttttccagaaggtcatgtgtatggaatcgtacagtatatggccttttcacattggcttctttttcttagtaatatgcgtttaaggttcttgaatgttttttcatggcttgatagctcatttgtttttagcactgaataatatctaattctctggatgtaccacagtttatttatccattcacctatgtaggacttttttttttttttttttgaggtggagtctcactctgtctcccaggctgcagtgcagtagggtgacctcagctcactgcaacctctgcctcccaggttcaagcgattctcctacctcagcctcctgagtagctgtgattacaggcgtgtgccaccacacccagctaatttttgttgttgttgttgttgttgttttctttctttttttttttttttgagatggagtttcgctctgtcgcccaggctggagtgcagtggcgcgatctcggctcactgcaagctctgcctcccgggttcacaccattctcctgcctcagcctcctgagtagctgggactacaggcacccgccaccacgcacggcttattttttgtattttttttttttttttttttttttttagtagagacggcgtttcaccatgttagccgggatgatctcgatctcctgacctcgtgatctgcccgcctcagcctcccaaagtgctgggattgcaggcgggagccactgcgcccagtgtaatttttgtatttttagtagagatggggttttgccatgttggccaggctggtcttgagctcctgatctcaggagatccacctgccttggcctctcaaagtgaagacatattttttattttattttattttattttattttattttattagagacaggggtctccctctgttgcccaggcagctcctaaacccctgatctcaagtgactgtctgcctcagctgcccaagtagcagggattacagtcacaagccaccgcccccggctctgtttaggaacatcttagttccaagttttggcaattatgggtaaagctgctataaacatatgtgtgcaggcttgtgcggacatacgttttcaaatcatttgggtagacaccaagagctgcattccagcctgggcaacaagagcgaaactccgtctcaaaaaaaaaaaaaaaaaaaaaaaaaaaaccagaaatgtaggccgggcatggcggcttgcacctataatcccagaactttgggaggccaaggcaggcagatcacttgaggtcaggagttcaagaccagcctgtccaacatggcgaaaccccgtctctactaaaaatacaaatattagccaggcgtggtggcgcatgcctgtaatcccagctactcaggaggccgaggcacgtgactcacttgaactcaggaggcagaggttgcagtgagcccagatcgtgccactgcactccagcctgggtgatgaagtgaaactctgtcaaaacagaaattattctctcgcagttatgaagtctcaaagggggatccttccttggctcctccggcgtctggaggctactggccatcctggtgttactcaaacaccaggggttccatctagggcctgccactcacctcacagaaagccaatcagtgagacaacgattcttgccaaggaagaaggctttaatcaggtgctgcagctgaggggatgggagggcttcatcccaggaatgcagggggtggttcaacataagaaaatccgttaacgtaatgtaccgcattagtagaacaaagggaaaaaaacagtcattccagctgacacagaaaaagcatctaagaaattctaacatttcatcattaaaacatagagaaaactatgaaacgaggggatctgcctcaacattataaaaggtatttgtgaaaaaaccacagttaccatcatacttagtggtgaaagactaaaagctttccccctaagttcaggaacaagacacagaggttcacctttaccactgctactcaatgttttttttttttgttttgttggttttgttgtgttttcgagaaggagtcttgctctgtcgcccaggctggaatgcagtggcgtgatctcggctcactgcagcctctgcccccggggttcaagcaattctcctgcctcagcctccccagtagctgggactacaggtgcgcactgccacgcctggctaatttttgtattcttagtagagacagggtttcaccatgttggccaggatgctcttgagctcctgaccttgttatctgcctgcctcggcctcccaaaatgctggaattacagatgtgagccaccgcgcctggcctagtcaacattttgctagaagttgtagccagagcctttaggtaagaaaaggcaccaaattgagaaataagaaataaaaccatcgctttaaatagggaaaatcccaaagaatacacgcacaataattactagagctaataagcaaatgcagcaaagtttcaggacacaagatcaactcacaaaaaccagttgtgtggtttcctgtttgtttttttgaggagttatgctcttatcgcccaggccggagtgcaatggcgtgatcttggctcactgcagcctctgcctcccgggttcaagcaattctcctgcctcagcctccccagtagctgggattacaggcgcaggccaccacgcccggccagtttttgtatttttagtagagacgaggtttcaccacgttggccaggatggtcttgatctcctgacctggtgatccacccgcctcggcctcccaaagtgctaggatgacaggcgtgagccaccgtgcccggtccagttgtgtttttatgcactggcaaggaacaattcaaaaatgtaattaagaaaaccgctgggcgtggtggctcacgcctgtagtcccagcactttgagcggccgaggcgggtggatcccttgatcccaggagttcaagaccatcctgggcaatgtggtgaaaccccctccctacaaaaaatacaaaaaattagcggagcgtgatggcatgtgcctacgatcccagctactcaggaggctgacgtgggaggatcacccgagccctgggggtcaaggctgcagtgagctgtcacatcatgcatcattgcactccagcctgaaaaaggagtgaaattctgcaacatgttacaacgtgaatgaaccttgaaaacgtcattctaagtgaaataagccagatacaaaaggacaatattgcatgtttccacttatagagatacctacaagaatcaaattcatagagacggaaagtagaatagtggttaaaggggtctgggcggagggaggaaagggaagtttgttttacgggtagagtttcagtttgggatgtcgaaaaagttctggagataaataatggtgatggttacatgccaatggctacacgaatgtacttaatgccactgaattgtatatgtgaaaaatggttaaaatggtaaattttgtatctatttaataccatcccccctaaaaaaaaaattgtttttaagagtcaagatctcactctgtctcccaggctggggtgcagtggggtaactgatcagagctcactgcagctttgaactcagccagcttccctgactcaaacgatcatcccgcttcagcctcccgagtagctgggactacagacggtgccatcacgcccagctcattgttgattcccgcccccttggtagagacgggattccgctatattgcctgggctggtgtcgaactcatagaacaaaggatcctccctcctgggcctgggcgtgggctcgcaaaacgctgggattcccggattacaggcgggcgcaccacaccaggagcaaacacttccggttttaaaaattcagtttgtgattggctgtcattcagtattatgctaattaagcatgcccggttttaaacctcttaaaacaacttttaaaattacctttccacctaaaacgttaaaatttgtcaagtgataatattcgacaagctgttattgccaaactattttcctatttgtttcctaatggcatcggaactagcgaaagtttctcgccatcagttaaaagtttgcggcagatgtagacctagcagaggtgtgcaaggaggccgttaagactatactttcagggatcatttctatagtgtgttactagagaagtttctctgaacgtgtagagcaccgaaaaccacgaggaagagaggtagcgttttctcctgagcgtgaagccggctttctggcgttgcttggctgcaactgccgtcagccattgatgatcgttcttctctccgtattggggagtgagagggagagaacgcggtctgagtggtttttccttcttgatggctcaatgacagagactagctcgtaaactccggggcgtttctgggctgttcgctcctgcttggcatgtcgcgagaaaggttttcgcctcctgtttcagcggtgacggctcttgggttttctcggggtggctttttaattttagtcttggcgcgaggcgggggatgctgtgtggcacctcctattgtctctttttgcgttttctcccattctcgctccctcttttgtcgccgtttcccgcccgccactcccacccccagacggggtctccgggtctcttgttctgtctgccggccccggctggattgcagtggcgcgatctcggctcctagcaacatctgcctcccgggctcaagcgagtctcccgcctaagccctcccgagtagccggggcttaaaggcgcacacgccactccaggctttttttttttttttttttttttttttggcagaaacggggtgtcagcatgttagccaggctggtctccaacgcgtgatctcaggtgatccgcccgcctcggcctcccgaagttctgggattacaggcgtgagccactgcacccggcccttctatttttttaaatagcgacggggtttcaccatgttggccaggctgctcctgaacacctgagttcaggtgatccgcccgcctcggcctcccgaagttctgggattacaggagtgagccaccgcgcccgactgagaactgtaagaaataaatttgtgttatttaagccacaaagtctgtgtattttgttatggagcccaagaaaagcagcttcttctgaaactaaacactttcggtatgatcagaactcgtgcctcttggtgtctacccaaatgagttgaaaatgtccacacaaaaacctgcacacctgtttatagcagctttatccataattgccaaaacttggaactaagatgttcctgaatagagccagcggctgtggcttgtgtctgtaatccctgctacttgggcagctgaggcagacagtcagtcacttgagataagcagtttgagaccagtctgggcaacagagtgagaccccatctctataaaaagtacttttagggccgggtgcgggtggcacgcctgtaatcgcagaacttcgggaggccgaggcgggcggatcacctgaactcaggtgttcaggagcagcctggccaacatggtgaaaccccgtcgctatttaaaaaaatagaagggccgggtgcagtggctcacgcctgtaatcccagaacttcgggaggccgaggccggcggatcacctgagatcacgcgttggagaccagcctggctaacatgctgacaccccgtttctgccaaaaaaaaaaaaaaaaaaaaaaaaaaagcctggagtggcgtgtgcgcctttaagccccggctactcgggagggcttaggcgggagactcgcttgagcccgggaggcagatgttgctaggagccgagatcgcgccactgcaatccagccggggccggcagacagaacaagagacccggagaccccgtctgggggtgggagtggcgggcgggaaacggcgacaaaagagggagcgagaatgggagaaaacgcaaaaagagacaataggaggtgccacacagcatcccccgcctcgcgccaagactaaaattaaaaagccaccccgagaaaacccaagagccgtcaccgctgaaacaggaggcgaaaacctttctcgcgacatgccaagcaggagcgaacagcccagaaacgccccggagtttacgagctagtctctgtcattgagccatcaagaaggaaaaaccactcagaccgcgttctctccctctcactccccaatacggagagaagaacgatcatcaatggctgacggcagttgcagccaagcaacgccagaaagccggcttcacgttcaggagaaaacgctacctctcttcctcgtggttttcggtgctctacacgttcagagaaacttctctagtaacacactatagaaatgatccctgaaagtatagtcttaacggcctccttgcacacctctgctaggtctacatctgccgcaaacttttaactgatggcgagaaactttcgctagttccgatgccattaggaaacaaataggaaaatagtttggcaataacagcttgtcgaatattatcacttgacaaattttaacgttttaggtggaaaggtaattttaaaagttgttttaagaggtttaaaaccgggcatgcttaattagcataatactgaatgacagccaatcacaaactgaatttttaaaaccggaagtgtttgctcctggtgtggtgcgcccgcctgtaatccgggaatcccagcgttttgcgagcccacgcccaggcccaggagggaggatcctttgttctatgagttcgacaccagcccaggcaatatagcggaatcccgtctctaccaagggggcgggaatcaacaatgagctgggcgtgatggcaccgtctgtagtcccagctactcgggaggctgaagcgggatgatcgtttgagtcagggaagctggctgagttcaaagctgcagtgagctctgatcagttaccccactgcaccccagcctgggagacagagtgagatcttgactcttaaaaacaattttttttttaggggggatggtattaaatagatacaaaatttaccattttaaccatttttcacatatacaattcagtggcattaagtacattcgtgtagccattggcatgtaaccatcaccattatttatctccagaactttttcgacatcccaaactgaaactctacccgtaaaacaaacttccctttcctccctccgcccagacccctttaaccactattctactttccgtctctatgaatttgattcttgtaggtatctctataagtggaaacatgcaatattgtccttttgtatctggcttatttcacttagaatgacgttttcaaggttcattcacgttgtaacatgttgcagaatttcactcctttttcaggctggagtgcaatgatgcatgatgtgacagctcactgcagccttgacccccagggctcgggtgatcctcccacgtcagcctcctgagtagctgggatcgtaggcacatgccatcacgctccgctaattttttgtattttttgtagggagggggtttcaccacattgcccaggatggtcttgaactcctgggatcaagggatccacccgcctcggccgctcaaagtgctgggactacaggcgtgagccaccacgcccagcggttttcttaattacatttttgaattgttccttgccagtgcataaaaacacaactggaccgggcacggtggctcacgcctgtcatcctagcactttgggaggccgaggcgggtggatcaccaggtcaggagatcaagaccatcctggccaacgtggtgaaacctcgtctctactaaaaatacaaaaactggccgggcgtggtggcctgcgcctgtaatcccagctactggggaggctgaggcaggagaattgcttgaacccgggaggcagaggctgcagtgagccaagatcacgccattgcactccggcctgggcgataagagcataactcctcaaaaaaacaaacaggaaaccacacaactggtttttgtgagttgatcttgtgtcctgaaactttgctgcatttgcttattagctctagtaattattgtgcgtgtattctttgggattttccctatttaaagcgatggttttatttcttatttctcaatttggtgccttttcttacctaaaggctctggctacaacttctagcaaaatgttgactaggccaggcgcggtggctcacatctgtaattccagcattttgggaggccgaggcaggcagataacaaggtcaggagctcaagagcatcctggccaacatggtgaaaccctgtctctactaagaatacaaaaattagccaggcgtggcagtgcgcacctgtagtcccagctactggggaggctgaggcaggagaattgcttgaaccccgggggcagaggctgcagtgagccgagatcacgccactgcattccagcctgggcgacagagcaagactccttctcgaaaacacaacaaaaccaacaaaacaaaaaaaaaaaacattgagtagcagtggtaaaggtgaacctctgtgtcttgttcctgaacttagggggaaagcttttagtctttcaccactaagtatgatggtaactgtggttttttcacaaataccttttataatgttgaggcagatcccctcgtttcatagttttctctatgttttaatgatgaaatgttagaatttcttagatgctttttctgtgtcagctggaatgactgtttttttccctttgttctactaatgcggtacattacgttaacggattttcttatgttgaaccaccccctgcattcctgggatgaagccctcccatcccctcagctgcagcacctgattaaagccttcttccttggcaagaatcgttgtctcactgattggctttctgtgaggtgagtggcaggccctagatggaacccctggtgtttgagtaacaccaggatggccagtagcctccagacgccggaggagccaaggaaggatccccctttgagacttcataactgcgagagaataatttctgttttgacagagtttcacttcatcacccaggctggagtgcagtggcacgatctgggctcactgcaacctctgcctcctgagttcaagtgagtcacgtgcctcggcctcctgagtagctgggattacaggcatgcgccaccacgcctggctaatatttgtatttttagtagagacggggtttcgccatgttggacaggctggtcttgaactcctgacctcaagtgatctgcctgccttggcctcccaaagttctgggattataggtgcaagccgccatgcccggcctacatttctggttttttttttttttttttttttttttttgagacggagtttcgctcttgttgcccaggctggaatgcagctcttggtgtctacccaaatgatttgaaaacgtatgtccgcacaagcctgcacacatatgtttatagcagctttacccataattgccaaaacttggaactaagatgttcctaaacagagccgggggcggtggcttgtgactgtaatccctgctacttgggcagctgaggcagacagtcacttgagatcaggggtttaggagctgcctgggcaacagagggagacccctgtctctaataaaataaaataaaataaaataaaataaaataaaaaatatgtcttcactttgagaggccaaggcaggtggatctcctgagatcaggagctcaagaccagcctggccaacatggcaaaaccccatctctactaaaaatacaaaaattacactgggcgcagtggctcccgcctgcaatcccagcactttgggaggctgaggcgggcagatcacgaggtcaggagatcgagatcatcccggctaacatggtgaaacgccgtctctactaaaaaaaaaaaaaaaaaaaaaaaaaatacaaaaaataagccgtgcgtggtggcgggtgcctgtagtcccagctactcaggaggctgaggcaggagaatggtgtgaacccgggaggcagagcttgcagtgagccgagatcgcgccactgcactccagcctgggcgacagagcgaaactccatctcaaaaaaaaaaaaaaagaaagaaaacaacaacaacaacaacaacaaaaattagctgggtgtggtggcacacgcctgtaatcacagctactcaggaggctgaggtaggagaatcgcttgaacctgggaggcagaggttgcagtgagctgaggtcaccctactgcactgcagcctgggagacagagtgagactccacctcaaaaaaaaaaaaaaaaaagtcctacataggtgaatggataaataaactgtggtacatccagagaattagatattattcagtgctaaaaacaaatgagctatcaagccatgaaaaaacattcaagaaccttaaacgcatattactaagaaaaagaagccaatgtgaaaaggccatatactgtacgattccatacacatgaccttctggaaaagcaaaactatggagacagtaaaaggctcagtggttagcaggggttgggggagggagggatggacaggcagagcacaggggactttcagggccacaaaactactctgtatgacatgacaatggtggatacggcattacacatttgtccaaacccacagaatgtacaacaccaggaatgagctgtaatgtgagctatggaccttatttaataattccatatgcatattggtacatcagttgtaacagaagtatcacgctataatgcaaaatgttactaacggggaaatgagtgtaggggtctgagagagaggatgtatggggattctgttctttgtgctcaattcttctgtaaacctataaccgctcctcccagaaaagtctactaattaattcttttttttttttttttaaagacggagtcttgctctgtgtcccagctggagtgcagtggtgcgatcttgtctcactgaatcaagagattctcctgcctcagcctcccaagtagctgggattacagacatgcatcaccatgcctggctaatttttgtatttttagtagagatggggtttcaccgtgttggccaggttagtcttgaactcctgatttcaggtgatctgtccacctcggcctcccaaagtgctgggattacaggcatgagccactgtgcctgccctctactaattaattttttaaaacacttaaaacacacaggcatacgtacataatgacaagtcactggctgttcacacacaaacagaatagcatgggttatgatcccagtcttaaaaaatcttacctgtcagctggacgtggtggttcacgcctataatcccagcactttgggaggccaagttaggaggatctcttgtgctcagtagttcaagaccagcttgggcaacagggtgaaaccccgtctctacaaaaaatacaaaacaattagccaggcatggtggcacgcatctgtagtcccagctacttgggaggctgaggcgggaaaatggcttgagcccaggaggtggaggttgcagtgagccaagatcataccactgccccccagcctggataacaaagccagaccctgtctcaagaaaacaaaaaacttgcctgtccatccattcattcatcttatatagatagattgaggctgtgtggagagaattctatgatgatgttcatgaaatataaaaccccacagatgggggagatttattgctttttttctgtatactttctaagtggcttggattttttctgttgagcatgtttataaaacaagtacttaaaatttttttttaatttaatgaagtagtgtgacatttcttgcacctttgagtttgtgagcaaatattcataaatttatatttggatgtatgagtttgttgtgagaaaaagaccacaaattcacgtatgaaaacccaaaaacccaatgtggttattgatgaggggtaggataatagattgtttgtttgtttgtttgtttatcttttcagagataagagtcttgctctgtcatccaggctggagtgcagtggcatgatcactgctcactgcagcctcaaactcctgggctcaagtcaacctcccacctcagcctcccaagtagctgagaccagaggtgctcgccaccatacctgacttatttatttatttacttatttatttattgtagagacaggatttcattgtgttgcccaggctggtcttgatctcctggcttcaagtaatcccttccacttcagcatcccgaagtgctggaattacaggtgtgagccaccatgtctggcccctggatttttttttaagtgcattttatcatattctttttcctcttccccctcctcttccactccccctcctccttttccttctatttcattttctaatcatgtcattcccttgctcactgctttcagtaccagacactagggaaataaaaattccttaaattgtatgacttattaaaaggtcccagcccctgtgggaggtccacagttccccaagcaaacgggaaaaacaggttcacaaactaggtaccttatattcacattatttaaagcttacagtaacccattttactggtggcaggattaagagccttaacctaggaatggaggagcccaggttcgaacccacatgtggggcgctgggagtgtggttcctcccagggctgccgggtttcttagccgcatctcaaggcagcccccagcgggccgcgccccatcctatggccgcctctgccctcttgcggcggcttctggaactacaggtcgccttccggtcccggaagtgaatgaggggtcccccgggggctgtgctaaggacggcctgtggcagggccactccacacccctcagcgtccgggccacacagacacagaacgcaagagagagactgacccacccacgcaccggtacccatagacgcagagaccgaggcagaaatgacgggattgccgcagaccggccaggagcagggacagacagcggctccgcagactctggtgggactgggctgaggccactctcgtgttctcaccacaccctctctcaactataactacctaataaaacttaaaattgttctataaagagatggggggggggcgtgtttgtttgtttgtttgttgagatagggtcttgctctgtccccaggctggagtgcagtgccgcaatctcggctcattgcaacctccccctcctgggctcaagcaatcctcccacctcagcctcccaagtagctgggactacaggcttgtgccaccactcccagctaattgatgtattttttgcagagacgaggtcttgctatgttgcggaggctggtcttaaacttttgggctcaagccatcctcctgcctcagcctcccaaaattcctgggattacaggcgtgagccaccacacctggtcaatacatgtactcaaagggggactttatctattgctactcttaaatggaaaatttgtgtcactttcataggcaataacaatgaaagtgaataggataaaaacaaaacaatgttattaaatggtgttggatgcttccccacagaggctgtgtaggatgagtgctctgttcaaaaacgagttttagcaaagtgtgaggacagttttgcaaacatgtttcatattccaactcagtagacacaatttttcacaaagtaacattcttccttttctgatattttctatcgtatgttattccatctatttcgttttattttttaaagcactcaaaggtgggtagaggcaagaagtataaaaacaggtgggggtcgaggctgagtggcggtagtgagggctcataccttccacttttgtgcatgttcagatttaatttgcaaattaaaaagaagtcgtgtatttttttttttgttttttttttttttttttttgagacggagtttcgctctgtcgctcaggctggagtgcagtggcgcgatcttgggtcactgcaagctccgcctcccgggttcacgccattctcctgcctcagcctcccgaatagctgggactacaggcgcccacgaccacgccccactaattttttgtgtttttagtagcgacggggtttcaccgtgttagccaggatggtcttgatctcctgacctcgtgatccgcccgcctcggcctcccaaagtgctgggattacaggcgtgagccaccgcacccggccttaaaaagaagttttaaaaaaactaatttggattcagtatactaactttatagctcactaagcagtcacaccccataattggaaaaactgtgtgcaaaatacgtaaagccctaacactgtgcagagattttacctgggcataatcagcagactgaaagtgaatgaagaaggaaattgccttcccactgtagttgattgtctactgaggcggccaccaagaacttctccctgccctgtgccctccgccacccccacatccaaaggtgaagcctatttcccctccccttgcatctggcctggccttgtggctgttttcacccctagaatgcacccccactagaatgcaccagaagcgatgttctgggacttccaagttaagacctcaagaggactagcagcttctgattgttatcatttgggatgctccttctggaaatgagccaccacgttgtgaggaagcccaagaagcaacacagaaagacccatgcggagaactgaggccctgggctaacagctccagctaagcttctagctggcagccagcagcaactgccagccacatacttcctatccatgcctatggcatcacatcacgaaaacacaggatgaccgggcgcagtggctcacgcctgtaatcccagcactttgggaggccgaggtgggcggatcacgaggtcaggagatcgagaccatcctggctaacacggtgaaaccccatctctactaaaaatacaaaaaattagccgggcgtggtggcgggcgcctgtagtcccagctactcgggaggctgaagcagaaaaatggtgtgaacccgggaggtagagctttcagtgaactgagatcgcgccactgcactccagcctgggcgacacagcgagactctgtctcaaaacaaacaaagaaacaaaaacaggattcccagttaaaattgagttttgaaaaaatagtgaaaaattattatcactattatttttatttttatttttttgagacggagtctggctctgtcaccctggctggagtgcagtggcacgatcttggctcactgctacctccgcctcccgggctcaagcaagtctcctgcctgagcctcccaagtagctgggactacaggcaagcgccaccactcctggctaatttttatacttttagtagagacggggtttcaccatattggccaggctggtctcgaacccctgaccttgtgatctgcccatctcagcctcccaaagtgctaggataacaggcgtgagccactgtgcctggcctgacaaattatttagtgtaagtatgccccaaataacgtgggacattctcataccaaaaaaaaaaaaaaaaaattcattcattgttttctaatttaactgggagtcctgtatttttatttgatatattcaacaaccctgcggactttctctggcttcaagagaatgctcagcccgggcgaagggcaaaagaacagtgaggacaagtgccaccctctccagcccttgttgggacacttccgagctgtgctcgcccaagagcactgagcctctgctgcctgcagcagtgacctgctccttcttggctttcaccccttgatctcacttctccacatgcctgctggtgcctcctagggttacctcccaaagaaactcccagtaccgaaattcttgtctcagggtcttttttttgagacggagtctcgtcctgtcgcccaggctggagtgtagtggtgcaatcttgactcactgcaacctccaccccctgggttcaagcaattctcctgcctcagcctcccgagtagttgggactacaggcgtgtgccaccacgcctggctaattttttgtattttttagtagaaataggttttcactatgttggccaggacggtctggatctcctgacctcatgatccatccgcttcggccttccaaagtactgggattacaggcgtgagccaccgcgcccggcctatttgagaactcaaaccaagacaggaagagccgggtaaacgctaagtttaatgatggccgttattccagttattcactcgcattgcctcttactgtagaggaaaataaacaggaatgtaataatcacagctaacattaattaagcccctactggatatgatacatgtttcagatgtactaactcacttcttaccaacaaccgtctgaaatatctttaagtccattttccacacagggaaaccaaggcatagagagcctaagcaacttaacatctcattgccagcaagcaacagcagcagaattcacacctagaaagtggggcttaataaaatgtaaaattgttctataaatagataaagtgttattaaaaagaaaaatagaatgaattttgaaacgtcaattaatgtacttatttatttatttatttatttgagatggagtcttgcttagtcgcccaggctggagtgcagcggtgcaatctcggctcactgcaagctccgcctcccaggttcacgccattctcctgcctcagcctcccgagtagctgggactacaggcgcccgccaccatgcccagctaatttttttgtatttttagtagagatgggatttcactgtgttagccaggatggtctcgatctcctgaccttgtgatccgcccgccttggcctcccaaagtgctgggattataggcgtgagccaccgcacctggcctattcattttatttttaagacagggtgtcactctgttacccaggctggagtgcagtggtacaatcatggctcacttcaacctcgaactcctgggctcaagtgatcctctcacctcagcctcctgagtagcaggtggacaccactcagggcccatgtgttcacatattaggccacagtgcctctccaacccccagaatgaaatccaagccccttggcctggtcctcaagtctttctctgacctggtcatccctgccacctgccctctcttctccagctaccttgaatcacttgaagaatctccatgcctcacagctttcattgctgttacttctgccttgaacacccttcctccttgtcattcccacttttcaagtctcacatcagcatgcactgcctcctccaggaagcctctcagcactcaccccagagtccgtcaggctcctccaggttcctatggcctcccagctgtcccctatttgatcacaagtgctggctctggaagagttgatagaggagcaggcggctgagtgagaggcaccatgaggagtgggcggctgagtgagaggcaccgtcctgccccatggttagcgcaaaaatcgataaaccagcacccaatgggcacctactgtgtgcaaggcactgttctcagtgctggggctacccatggaagtagacagacaaaaatccccgcacttacaggccgactttctcctgggcaggcagacgataaacacagtaagtaggatggagagctgggaggtggcccaaggagagcacatgagggaggatgctgggcgttcgtgccatttgcatggctatgacagcgtgctgcgggggcatcgatgttcccacctccccatgaggcctcccctcgcatcctcggatacacactggcccctccagctccacttcccttttttttttttttttttttttttttgagatgaagtcttgctctgtcgcccaggctggagtgcagtggcccgatctcgactcactgcaacctctgcctctcaggttcaagcgattctcctgcctcagccttccaagtagctgggactacaggcgcccaccaccatgcccggctaatttctgtatttttagtagagacagggtttcaccgtgttggcctggctggtctccaactcctgacctcaggtgatctgcccgcctcagcctcccaaagtgctgggatgacagacgtgagccaccacgcccggcttttttttttttttagactgagttttgctcttgttgcccaggctggagtgcaatggtgtgatctcagctcactgcaacctctgcctcccaggtgcaagtgactctcctgcctcagcctcccgagtagctgggattgcagacatgccccaccatacctgactcattttttatttttggtagagacggggtttctcagtgttggtcaggctggtctcaaactcctgacctcaggtgatccgcccgcctcgacctcccaaagtgctgggattacaggcgtgagccaccgcgcccggtccggcttcacttctttaagcactcaccctgtgctagatagacaactgacattccgcgttgtgtttattgtttattgcccgtcccctctatgtcagcttcctgaggcagtgactttgctcatcgttgtccctgcggtatcgccggtgcccaactcagtatctagcacacggtaagtactcagggaagagttgtggaggatacattttgcggaaggggaaactgaatctcaaggaaggaagatgatttgctcgaggccacatgaaaattagaaggcaggagagggatttgagcagggtctgtggctccgagaccgaggctcctctccgggtgactcttcccgggattctggcctcatttggacctccagggccccggacctgagcctggggcagagctgggacccaggcgggcgaggctgagcggctagctgagagtcgccagcagagggcgctgtctacacgtgtccgggcgcaaggaggcaccagtagggctgagcctggggagacagagagagcggcgggttgtggggtggtggggcagtggggcggtggggcggtggggcggtggggcgacaggatggggaggagactgaggcagcgggtgctgtgggaacctacaggagaactttaccagctggataaaggcaggtttcccaggagtttattttttaactgtatgctgaaaaataaatgggaggtggcgtttgagaaagcgaagtgtgttccaggtggagagaacagcatgtgtgaaggcccagagccggcccccggatcttttcagaatgcatcttggtcaggggaggatggtcggccaggacacatgcatggccccctggagtcgtgcagcgctggccttggtgaggcacagattgaggcgtaaaggaggtgctcctgccgaaatttaattatgcccaggcatggtatcccagcattttgggaggccaaggtgagaggattgcttgaggccaggaagttcgagaccagcctgggcaacatagtgagatgcgatctctacaaaaatttaaaaaattagccaggtgtggtggcatacacttgtagtcccagctactctggaggctaaggtggaaggatcacttgagcacaagaagtggaggctgcagtgagctgaaggggccactgcactccagcctgggtgacagaacaagaccctgtctaaaaaacaaacaaagaagtaaatgccctagtctcaggtattctgttagagcaacaccaaacacactaagacagggaggaaggggctgggtgggctcccacagtcctgtccagccactgggcccgtgcagcacagcacttcccgggtgcatcagcattgagcctttcctgagtgctgctgccatctgtcctccagttatgaagggaacaagagacccagaaggggtggggctggcccatggtctcccttgctcacagccctgggctggagcccttgtacagagctgcctcctggtcagccaagaaaggctcactggaggaggaggggtaggtcaggcctcttcctggcctcagaacaggatatgggtgggggatgttggtgtctcctacactggggcctgcccaccttcttcccccaatgttcctccatcctgctctgagcgttgtgcagaggaccctggactgtggggttcatcctttcctagggagcttccaagggcccacacagcctgctccccgcaccccatggaggcgcaatgatagcagaattactggcactgttaacctgctggagtgggaacctggagtcctggaaggtcagaggtcaagctggggggctgggggcactgcctgcactggccactgcagtgcagagaagctgaggtgacctcaatctgagagactggagaccagggttgggtgagggtgcatgggaaacgggtggatggggactgggtgaatgggtactgagtggatggggactgggtggatggggagtgggtggatggatagtgggtggatggggactgagtggatggggactgggtagatggatactgggtggatggggactgagtggatgggtactgggtggatggggactgggtgggtggggattggtggatgggtactgggtggatggggactgggtggatggggactgggtgggtggggattggtggatgggtactgggtggatggggactgggtgggtagggattggtggatggggactgggtggatggggattggtggatggggattggtggatggggactgggtgggtggggactgggtggatggggattggtggatggggactgggtggatggggactgggtggatggggattggtggatggggactgggtggatggggactgggtagatggggactgggtgggtggggactgggtggatggggattggtagatggggactgggtggatggggatttgtggatggggactgggtggatggggattggtggatggggactgggtggatgggaactgggtagatggatactgggtggattgggactggtggatggggactgactggatggaaggagggcagggggccaggtggggccaggcagcctgcctgctctgctgagcagcctggacccaggggctgcctctcccaggcctcagtctcatcatctatagaatggagtttccagagatggtctgaggccccttccaactacctgcaatgtgctgggtcccaggtccacaggaaggactggttcctagggtcttccttcccagcaaattgtccctcctgcttctggcagcaaaagcttcccaggataatattatcaatagtaatattgtcccccctcctcctctgcctcttcttgtgtttctatattccaggaactttcctaaatgattcatttatttatcaaataatttaatcccccacaatcccatgagtaagagacatttactgatccctttttatagttgaggaaacagactcagggaggggaggtgacttgccagagccacacagctggcaatctggctcctgtacttccgcatccctgaggtcactttggtgcccccgccgcatgccagggataaagagacccaagaccttaccgcaactcacggagacctatgtggctgcatgtgtcacccccaggcagagtgacttgaagggcccagggaggggcctcttttcatcctggggactgccaagccctggagtccagctgggcacgggcagtcagcctgggctgggggatggtgcctggctgctaggatgctggtcctagcatggcaggcatgggttaaaatcccagctgtgccactttctggtgtgtgattccaggcacgtgacctttctgctttgtgcctcagtttccccttctgtggaacggggataatagcaacacctcttttataaggcaaggtggttgtgaggattcaatgaagcaatacacgaaagcagttgcctgcttggtcccgtgggttctccatgggatagggaacccacggaagccacgcccagctaatttttttgtattttttttagtagagacagggtttcaccatgttggccaggctggtttcaaactcctgaccttgagtgatccacccacttcagcctcccaaagtgctaggattacaggcctgagccacggctcctggctgtttgttttttgagacagggtctcactctgtcgcccaggcttgagggcagtggtgctgtcatagctcattgcagccttgatctcctgggctcaagtgatcctcccacttcagcctcctgagtagctgggactacacgtccacactaccatgcctggctagttttttattttgtagaggggggatttcaccatgttaccatggtcttgaactcctaagctcaagtgatccacccacctcggcctcccaaagtgccggaattataggcatgacccaccatgcccagcctgaatggccacttttgatggagcacttactatgtgtcgccaaacccctctgagcctcagtttcctcctttgtaggtgggacttgctcagggactcactgctggccttggggagcagagaactcaggtctttgtgattccgaagtccaggttcttccacctgcaactgcagtttccagaattggtcccaccccaggaggatcagccaggtgatatgagatcctgctcggggctgtgaaaagggaatgggaagtcagggcaccctgcctggtcccacactgatccacctggggtacccatctgagaaataggggtggagaccagactggatgatgcaaatggcatgtggcattgatcattggcccctcacgctggccacggcctctaggtgggcagagtgcactccctgtctcttgactctgggctcagccatgtaacttgctttggtcaatgggatagcagtggctataacaagaccaaaggcttgaggtgcacttccacagtggagctgtcttcttggcttctgctgtgagaagattgtccccctgaatggctgccggcccttcagcctcgccccgccaagagacacatggaacagccagagcccagcctagagcctgtatcccagcctagcctgaggcagagccacccagccaagaccaactgaccttcagctaacctgcagatgcatcagggggaattaaatgattgttctaaaccactgagttttggggtggtttgttatgtggcattattgcagtgatagctaatacaagcctggtgtcagtctacaactcttggactctgagctgcatttacgtcctgaatccatcacttactgagaatcaggtctttattattattattaattttactccatcaatttcaagttttccataagagacatagacaatgtaaaggtcaaagattttgggcgacaaaacagagataactacaaaacctctggcaaacaacagttgctacctttgcaccaagctgagctctgagcttcctgacaggcatggcaaagagaggaagaacatgcactactcatatgctggggagcattaaggtcctacgggctgcgtcccatgggctggcgacctcccactggggccctcttcacattgctgtgggatcccagcattttccccaactttcctccttccagaccctgctccagtatcaccccaacttgaagccttcctggctgttagaatttcttacagcagattgcctctgtcactcattagttcatcccgtatctgctggcatcaacctatgttgtgcttagaaaagacttatagaggccgggcgtggtggctcacgcctgtaatcccagcactttgggaggccgaggtgggtggatcatgaagtcaagagattgagaccatcctggccaacatggtgaaaccctgtctctactaaaaaaatgcaaaaaaattagctgggcgtggtggcgggcgcctgtagtcccagctacttgggaggctgaggcaggagaatcacttgaacccgggaggcggagcttgcagtgagctgagattctgccactgcactccagcctggcgacagagcgagactctgtctcagaaaaaaaaaaaaaaaaagaaagaaagaaagaaaagaaaagatgtattgaggctgggcgcagtggctgaagcctgtaatccaccaaggtgggcggattgcctgagctgaggagtttgagaccagtttgggcaacatggtgaaactcccgtctctactaaaatacaaaagaaattagccaggcatggtggcatccgcctgcagtcccagctactcgggaggctgaggcaggagaatggctcgaacccaggaggtggaggttgcaatgagccgagattgcgccactgcattccagcctgggcgacagagcatgactccatctctaaaaaaaaaagaaaagaaaagaaaggacttggctgggcacggtggctcacgcctgtaatcccagcacgtcgggaagccaaggtgggtggatcacgaggtcaggagatcgagaccatcctggctaacacagtgaaaccccgtctgtattaaaaatacaaaaaaattagccaggtgtggtgacgggtgcctgtagtcccagctgctcgggaggctgaggcaggagaatggcgtgaccccaggaggtggagcttgcagtgagccgagattgcaccactgcactccagcctgggcgacagggcgagactctgtctcaaaaaaaaaaagaaaagaaaagaaaagaaaagacttatcgagtgaataatgaataaatgaatgaatgaggaaatgaatttacagatggggaagtgaattaatgaagttaaaagcaagtacatggaagaaagtgtttgtttacctgagtctgattaggggaaggagccctgagtggaggcactgtcgtttgaggtggtcttgcctatacctttgtaaagaatgcttgagaagtttcttgaggggttctgggagctgaggatcacataagaattctagccgagaacaatttgtcagctgtcacagtgcagagcatgatggttgaactcaaatgccgccaagcagatgacagggacagtttccacctagttcaggaacataagctaaggcacttcagggaggtttttttgtttgtttgtttttaatttttttgagacagggcctcactccgtcacccaggctgactgcagttgtgcggtcttgattcactgcagcctggaactcttgggctcaagggattctcccacctcagcctcctcagtagctgggatcacaggcttgcaccactatgccggctaattttttaatttttttccagagagggggtcttgctttgttgcccaggctgctctcaaactcctggcctcaagtggtccttccatctcggcctcctaaagtgctcagattacaggcgtgagccaccgtgcccagctggggagtatttttatgtccccaaaatgcaggatctgcctccagttgatttatctttagtgaataaggatgaaaatgctatctatttcctggaaaatcctcttggccttcaaccaaaaatggttaaaacagatcttgaagaagagctagttgagtggggcaaaatgggagcctatggtcacgaagaaggcagcatccttgggatacagagatgagagtattgtaggcctacagaaggactataggagcctacgagaaagaaatagccctagtgaatgcgctgactgttaatctacatcttctactgttacccagggtctcactctgttgtccaggctggagtgcagtggcacaatcacagctcactgcagcctcaacttcccgggctcaggtgatcctcccatcttaacctcccaggtagctgggactacaggcacacaccaccacgccagactaatttttgtatttttttgtagagatggggtcttgccatgttgcacaggctggtctcgaactccttggattacaggtgtgagccaccgcgcccagccttagtccagttattgtttaagcctataccaaatggtataaaattcttatagaagccaaagctttctcttttaatcattatactgttgagtcacagctacgactccatggagttaacattgaggaaaggggattataaagccaagacgggggaggaaaccttaagaataaaggatattggccgggcgcggtggctcatgcctgtaatcccagcactttgagaggccgaggccggtggatcaccagaggtcaggagtttgagaccagcctggccaacacggtgaaaccccgtctctactaaaagtacaaaaattagctgggcgtcgtggcaggcgcctgtaatcccagctactctggaggctgaggcaagagaatcgcttgaacccgggaggtggaggttgcagtgagctgagatcgtgccattgcactccagcctgggggacaagagagagatttcgtctcaaaaaaaaaaaaaaaagaaaaattagctgggtgtggtgatgcatgcctgtaatcccagctacccaggaggctgagacaggagaatcacttgaacccaggaggtggaggttgcagtgagtcaagatagcgtcactgcactccagcctgggtgacacagcaggactccatctgagaaaaataaataaataaataaaataaaataaaggatatccctgaagcaattgagaagggaggaggctcaattacagcaatcctgttcagtgggctgcatttttatactaggcagctctttaatatacctgctaccacgaaagctggacaagtgaagggatgttttgctggcttgatctagcatgtacagttggaaatgctgaactcacttacgtgacagaagagttgactttgcccactggtgttcccacaataatttgaatgcaggagcaggaggtctggcaggtactttttccatgaaaagcatgcccgtatgattaaagctgtgctgctggggtggtttggctgtgaactcagcaccagatttgagatggataaccaactgcagttaatccctggggttagtggattccaaatttcaaatcctcccattttgttggtctgtttcttacagtttagagatctttaggcaggcagcgattaaagcattgtggagaaaatctattttgctgactggttatctggaatacctgatctagcactgctatggcaaaaataaagcagaatctaagaagccaatggtgacctggaggtgaccattactccatcccatatggaggatcagggctgccagctgacactaacatttttctgttccaaagaaagatgttttccaagaggtagaaaaaagaggagtggtttatgacaagtggaatccaaatgtcattcaagtggctccagttcctttctatcattctttccatgatgtttataaatttatcaatctgggctgggtgtggtggctcacacctgtaatctcaccactttgggaggccgaagccagaggatcacttgagcctaggagtttgagaacagcatggacaacatagtgagaccctgtttctacaaaaaaacaaacaaaaaaaagtatttttaattagccaggcatggtggcacacacctatagtccctgctacccagaaggctgaggcaggaggatcacttgatcccaggagatcaaggctgcagtgagctgtgatggcaccactgcactccagcctgggcaagagagtgagaccctgtctccaaaaaaaaaaaaaaaaaatttatcagtctgctcacttctgtacttcactctgcagaaacaaaaattagcagtgttttctagaacaatttaagcaaattatactgaaagctgatgtgtgttttttttttttaccattattcaatttttagttattgaaagtattttacaattgattgcatgtagctggcagtaagtaatatactttacagaaaagaaaaataagtaaatgaaacaacaagtaagactaaggagtgatgggggggctaaggaaattgcttttattttatacaagtttattgaaaaccacctgtacttatccctgagagaggatgcagatatggcccctgcttattagaagcacaggtctgagggggggaggcagatccagatccagacccagccaatcatggctgaaggtgatcagtgctgtgacaaaggagtcccagggactgaagggcccaagaaagccccagtccatcctggaggtcagggaaagctccctggggatggaaagaaatgggttgtataggaatttgccaggagaagaggtgggagaagatggagcaacatgagcaaagggtgaggaatgagaagaactaagcaaatgtgcaggagaaataaatggagcttctagaaatttaacacctggtaacatattaaaaactcaatggagagtttaaacgacagtttagacaaagctgaatagagaattcatgatctggaagatggatttgaagaaattatccagaattcaacccagaaagaaaaataaatggaaaatgggggcaggggggaaagaagaattcaacctgagaaagctgaaggaggaggaggaggaggaggaggaggaggaggtggcagcagtagcaaggagaaggagaagaagaaggaggaggagaaggagaaggatgaggaggagggagaggagaagaagaagaagacgaagaagaagaggaggaggaggaagaggaggaggagaaaacaaagaaaaaaagtggttaggagccagggagaatacaacaggaagagctaacataggtagcagttccagacagagaagggaaaacgagacaaattcaatatttgaaaacatgaagtctgactttttttccatatctaataagcaccaccaaatgcatagattctagagatccaatgaatcccaagcaagataggtaggaagaaattcatgtctggacatattgtagtgaaaatatagaacaccaaagtcaaagaggagatcctagaagcaaccagagagaaagcagaggagattctttaagtgtttcagtgttgcaacagtgagatattcaaaggcagggagtatagggaaatggggctctagtagagccaattattaagggtgattttgagccagaggagtgatacgatgagatctgtgtttcagaatctgagtatggaaagccaggtgcgctgctcaaacctgtaatctcagcactttggggggccaaggtgtgtggatcgcttgagaccaggagtttgagaccagcctgggcaacagagtaagagacgctgtttctttttcttttcttttcttttttttttttttgagacagagtttcactctgtcacccaggctggagtgcagtggcgtgatctcggctcgctgcaacctccgcctcccgggttcaaacgattctcctgtctcagcctcccaagtagctgggactacaggtgcccacaaccagacctggctaatttttgtagttttagtagagacagggtttcatattggccaggctggtctcgaactcctgaccttgtgatccacctgccttggcctcccaaagtgctggaattacaggtgtgagccaccgcgcctggcaagagatgctgtttctacaaaaaaataaacaaaaaaaattagctgagcatggtggcatgtacctatagtcccagccatttgagaggctgaggtaggaggatcacctgggcccgggggctca
